(19) United States
(12) Patent Application Publication
(10) Pub. No.: US 2007/0055056 A1
(43) Pub. Date: Mar. 8, 2007

(54) 251 human secreted proteins

(76) Inventors: Craig A. Rosen, Laytonsville, MD (US); Steven M. Ruben, Brookeville, MD (US)

Correspondence Address: HUMAN GENOME SCIENCES INC., 14200 SHADY GROVE ROAD, ROCKVILLE, MD, 20850, US

(21) Appl. No.: 10/664,357

(22) Filed: Sep. 20, 2003

Related U.S. Application Data
(63) Continuation-in-part of application No. PCT/US02/08124, filed on Mar. 19, 2002.
Application No. PCT/US02/08124 is a continuation-in-part of application No. 10/100,683, filed on Mar. 19, 2002.
Application No. PCT/US02/08124 is a continuation-in-part of application No. 09/981,876, filed on Oct. 19, 2001, now Pat. No. 7,053,190.
Application No. 09/981,876 is a division of application No. 09/621,011, filed on Jul. 20, 2000, now Pat. No. 6,878,687.
Application No. 09/621,011 is a continuation of application No. 09/148,545, filed on Sep. 4, 1998, now Pat. No. 6,590,075.
Application No. 09/148,545 is a continuation-in-part of application No. PCT/US98/04482, filed on Mar. 6, 1998.
Application No. 10/100,683 is a continuation-in-part of application No. 09/621,011, filed on Jul. 20, 2000, now Pat. No. 6,878,687.
Application No. 09/621,011 is a continuation of application No. 09/148,545, filed on Sep. 4, 1998, now Pat. No. 6,590,075.
Application No. 09/148,545 is a continuation-in-part of application No. PCT/US98/04482, filed on Mar. 6, 1998.
Application No. 10/100,683 is a continuation-in-part of application No. 09/148,545, filed on Sep. 4, 1998, now Pat. No. 6,590,075.
Application No. 09/148,545 is a continuation-in-part of application No. PCT/US98/04482, filed on Mar. 6, 1998.
Application No. 10/100,683 is a continuation-in-part of application No. PCT/US98/04482, filed on Mar. 6, 1998.
Application No. 10/100,683 is a continuation-in-part of application No. 09/882,171, filed on Jun. 18, 2001, now abandoned.
Application No. 09/882,171 is a continuation of application No. 09/809,391, filed on Mar. 16, 2001, now abandoned.
Application No. 09/809,391 is a continuation-in-part of application No. 09/149,476, filed on Sep. 8, 1998, now Pat. No. 6,420,526.
Application No. 09/149,476 is a continuation-in-part of application No. PCT/US98/04493, filed on Mar. 6, 1998.
Application No. 10/100,683 is a continuation-in-part of application No. 09/809,391, filed on Mar. 16, 2001, now abandoned.
Application No. 10/100,683 is a continuation-in-part of application No. 09/149,476, filed on Sep. 8, 1998, now Pat. No. 6,420,526.
Application No. 09/149,476 is a continuation-in-part of application No. PCT/US98/04493, filed on Mar. 6, 1998.
Application No. 10/100,683 is a continuation-in-part of application No. 09/149,476, filed on Sep. 8, 1998, now Pat. No. 6,420,526.
Application No. 09/149,476 is a continuation-in-part of application No. PCT/US98/04493, filed on Mar. 6, 1998.
Application No. 10/100,683 is a continuation-in-part of application No. PCT/US98/04493, filed on Mar. 6, 1998.
Application No. 10/100,683 is a continuation-in-part of application No. 10/058,993, filed on Jan. 30, 2002, now Pat. No. 6,951,924.
Application No. 10/100,683 is a continuation-in-part of application No. 09/852,659, filed on May 11, 2001, now abandoned.
Application No. 09/852,659 is a continuation-in-part of application No. 09/152,060, filed on Sep. 11, 1998, now Pat. No. 6,448,230.
Application No. 09/152,060 is a continuation-in-part of application No. PCT/US98/04858, filed on Mar. 12, 1998.
Application No. 10/058,993 is a continuation-in-part of application No. 09/853,161, filed on May 11, 2001, now Pat. No. 6,919,433.
Application No. 09/853,161 is a continuation-in-part of application No. 09/152,060, filed on Sep. 11, 1998, now Pat. No. 6,448,230.
Application No. 09/152,060 is a continuation-in-part of application No. PCT/US98/04858, filed on Mar. 12, 1998.
Application No. 10/058,993 is a continuation-in-part of application No. 09/852,797, filed on May 11, 2001, now Pat. No. 6,878,806.
Application No. 09/852,797 is a continuation-in-part of application No. 09/152,060, filed on Sep. 11, 1998, now Pat. No. 6,448,230.
Application No. 09/152,060 is a continuation-in-part of application No. PCT/US98/04858, filed on Mar. 12, 1998.
Application No. 10/100,683 is a continuation-in-part of application No. 09/852,659, filed on May 11, 2001, now abandoned.
Application No. 10/100,683 is a continuation-in-part of application No. 09/152,060, filed on Sep. 11, 1998, now Pat. No. 6,448,230.
Application No. 09/152,060 is a continuation-in-part of application No. PCT/US98/04858, filed on Mar. 12, 1998.
Application No. 10/100,683 is a continuation-in-part of application No. 09/853,161, filed on May 11, 2001, now Pat. No. 6,919,433.
Application No. 10/100,683 is a continuation-in-part of application No. 09/152,060, filed on Sep. 11, 1998, now Pat. No. 6,448,230.
Application No. 09/152,060 is a continuation-in-part of application No. PCT/US98/04858, filed on Mar. 12, 1998.
Application No. 10/100,683 is a continuation-in-part of application No. 09/852,797, filed on May 11, 2001, now Pat. No. 6,878,806.
Application No. 10/100,683 is a continuation-in-part of application No. 09/152,060, filed on Sep. 11, 1998, now Pat. No. 6,448,230.
Application No. 09/152,060 is a continuation-in-part of application No. PCT/US98/04858, filed on Mar. 12, 1998.
Application No. 10/100,683 is a continuation-in-part of application No. 09/152,060, filed on Sep. 11, 1998, now Pat. No. 6,448,230.
Application No. 09/152,060 is a continuation-in-part of application No. PCT/US98/04858, filed on Mar. 12, 1998.
Application No. 10/100,683 is a continuation-in-part of application No. PCT/US98/04858, filed on Mar. 12, 1998.
Application No. 10/100,683 is a continuation-in-part of application No. 10/059,395, filed on Jan. 31, 2002, now abandoned.
Application No. 10/059,395 is a division of application No. 09/966,262, filed on Oct. 1, 2001, now abandoned.
Application No. 09/966,262 is a continuation of application No. 09/154,707, filed on Sep. 17, 1998, now abandoned.
Application No. 09/154,707 is a continuation-in-part of application No. PCT/US98/05311, filed on Mar. 19, 1998, now abandoned.
Application No. 10/100,683 is a continuation-in-part of application No. 09/984,245, filed on Oct. 29, 2001, now abandoned.
Application No. 09/984,245 is a division of application No. 09/154,707, filed on Sep. 17, 1998, now abandoned.
Application No. 09/154,707 is a continuation-in-part of application No. PCT/US98/05311, filed on Mar. 19, 1998, now abandoned.
Application No. 10/100,683 is a continuation-in-part of application No. 09/983,966, filed on Oct. 26, 2001, now abandoned.
Application No. 09/983,966 is a division of application No. 09/154,707, filed on Sep. 17, 1998, now abandoned.
Application No. 09/154,707 is a continuation-in-part of application No. PCT/US98/05311, filed on Mar. 19, 1998, now abandoned.
Application No. 10/100,683 is a continuation-in-part of application No. 09/966,262, filed on Oct. 1, 2001, now abandoned.
Application No. 09/966,262 is a continuation of application No. 09/154,707, filed on Sep. 17, 1998, now abandoned.
Application No. 09/154,707 is a continuation-in-part of application No. PCT/US98/05311, filed on Mar. 19, 1998, now abandoned.
Application No. 10/100,683 is a division of application No. 09/154,707, filed on Sep. 17, 1998, now abandoned.
Application No. 09/154,707 is a continuation-in-part of application No. PCT/US98/05311, filed on Mar. 19, 1998, now abandoned.
Application No. 10/100,683 is a continuation-in-part of application No. PCT/US98/05311, filed on Mar. 19, 1998, now abandoned.
Application No. 10/100,683 is a continuation-in-part of application No. 09/814,122, filed on Mar. 22, 2001, now abandoned.
Application No. 09/814,122 is a continuation of application No. 09/577,145, filed on May 24, 2000, now abandoned.
Application No. 09/577,145 is a continuation of application No. 09/166,780, filed on Oct. 6, 1998, now abandoned.
Application No. 09/166,780 is a continuation-in-part of application No. PCT/US98/06801, filed on Apr. 7, 1998.
Application No. 10/100,683 is a continuation-in-part of application No. PCT/US98/06801, filed on Apr. 7, 1998.
Application No. 10/100,683 is a continuation-in-part of application No. PCT/US98/06801, filed on Apr. 7, 1998.
Application No. 10/100,683 is a continuation-in-part of application No. PCT/US98/10868, filed on May 28, 1998.
Application No. 10/100,683 is a continuation-in-part of application No. PCT/US98/11422, filed on Jun. 4, 1998.
(60) Provisional application No. 60/277,340, filed on Mar. 21, 2001.
(60) Provisional application No. 60/306,171, filed on Jul. 19, 2001.
(60) Provisional application No. 60/331,287, filed on Nov. 13, 2001.
(60) Provisional application No. 60/040,162, filed on Mar. 7, 1997.
(60) Provisional application No. 60/040,333, filed on Mar. 7, 1997.
(60) Provisional application No. 60/038,621, filed on Mar. 7, 1997.
(60) Provisional application No. 60/040,161, filed on Mar. 7, 1997.
(60) Provisional application No. 60/040,626, filed on Mar. 7, 1997.
(60) Provisional application No. 60/040,334, filed on Mar. 7, 1997.
(60) Provisional application No. 60/040,336, filed on Mar. 7, 1997.
(60) Provisional application No. 60/040,163, filed on Mar. 7, 1997.
(60) Provisional application No. 60/047,615, filed on May 23, 1997.
(60) Provisional application No. 60/047,600, filed on May 23, 1997.
(60) Provisional application No. 60/047,597, filed on May 23, 1997.
(60) Provisional application No. 60/047,502, filed on May 23, 1997.
(60) Provisional application No. 60/047,633, filed on May 23, 1997.
(60) Provisional application No. 60/047,583, filed on May 23, 1997.
(60) Provisional application No. 60/047,617, filed on May 23, 1997.
(60) Provisional application No. 60/047,618, filed on May 23, 1997.
(60) Provisional application No. 60/047,503, filed on May 23, 1997.
(60) Provisional application No. 60/047,592, filed on May 23, 1997.
(60) Provisional application No. 60/047,581, filed on May 23, 1997.
(60) Provisional application No. 60/047,584, filed on May 23, 1997.
(60) Provisional application No. 60/047,500, filed on May 23, 1997.
(60) Provisional application No. 60/047,587, filed on May 23, 1997.
(60) Provisional application No. 60/047,492, filed on May 23, 1997.
(60) Provisional application No. 60/047,598, filed on May 23, 1997.
(60) Provisional application No. 60/047,613, filed on May 23, 1997.
(60) Provisional application No. 60/047,582, filed on May 23, 1997.
(60) Provisional application No. 60/047,596, filed on May 23, 1997.
(60) Provisional application No. 60/047,612, filed on May 23, 1997.
(60) Provisional application No. 60/047,632, filed on May 23, 1997.
(60) Provisional application No. 60/047,601, filed on May 23, 1997.
(60) Provisional application No. 60/043,580, filed on Apr. 11, 1997.
(60) Provisional application No. 60/043,568, filed on Apr. 11, 1997.
(60) Provisional application No. 60/043,314, filed on Apr. 11, 1997.
(60) Provisional application No. 60/043,569, filed on Apr. 11, 1997.
(60) Provisional application No. 60/043,311, filed on Apr. 11, 1997.
(60) Provisional application No. 60/043,671, filed on Apr. 11, 1997.
(60) Provisional application No. 60/043,674, filed on Apr. 11, 1997.
(60) Provisional application No. 60/043,669, filed on Apr. 11, 1997.
(60) Provisional application No. 60/043,312, filed on Apr. 11, 1997.
(60) Provisional application No. 60/043,313, filed on Apr. 11, 1997.
(60) Provisional application No. 60/043,672, filed on Apr. 11, 1997.
(60) Provisional application No. 60/043,315, filed on Apr. 11, 1997.
(60) Provisional application No. 60/048,974, filed on Jun. 6, 1997.
(60) Provisional application No. 60/056,886, filed on Aug. 22, 1997.
(60) Provisional application No. 60/056,877, filed on Aug. 22, 1997.
(60) Provisional application No. 60/056,889, filed on Aug. 22, 1997.
(60) Provisional application No. 60/056,893, filed on Aug. 22, 1997.
(60) Provisional application No. 60/056,630, filed on Aug. 22, 1997.
(60) Provisional application No. 60/056,878, filed on Aug. 22, 1997.
(60) Provisional application No. 60/056,662, filed on Aug. 22, 1997.
(60) Provisional application No. 60/056,872, filed on Aug. 22, 1997.
(60) Provisional application No. 60/056,882, filed on Aug. 22, 1997.
(60) Provisional application No. 60/056,637, filed on Aug. 22, 1997.
(60) Provisional application No. 60/056,903, filed on Aug. 22, 1997.
(60) Provisional application No. 60/056,888, filed on Aug. 22, 1997.
(60) Provisional application No. 60/056,879, filed on Aug. 22, 1997.
(60) Provisional application No. 60/056,880, filed on Aug. 22, 1997.
(60) Provisional application No. 60/056,894, filed on Aug. 22, 1997.
(60) Provisional application No. 60/056,911, filed on Aug. 22, 1997.
(60) Provisional application No. 60/056,636, filed on Aug. 22, 1997.
(60) Provisional application No. 60/056,874, filed on Aug. 22, 1997.
(60) Provisional application No. 60/056,910, filed on Aug. 22, 1997.
(60) Provisional application No. 60/056,864, filed on Aug. 22, 1997.
(60) Provisional application No. 60/056,631, filed on Aug. 22, 1997.
(60) Provisional application No. 60/056,845, filed on Aug. 22, 1997.
(60) Provisional application No. 60/056,892, filed on Aug. 22, 1997.
(60) Provisional application No. 60/047,595, filed on May 23, 1997.
(60) Provisional application No. 60/057,761, filed on Sep. 5, 1997.
(60) Provisional application No. 60/047,599, filed on May 23, 1997.
(60) Provisional application No. 60/047,588, filed on May 23, 1997.
(60) Provisional application No. 60/047,585, filed on May 23, 1997.
(60) Provisional application No. 60/047,586, filed on May 23, 1997.
(60) Provisional application No. 60/047,590, filed on May 23, 1997.
(60) Provisional application No. 60/047,594, filed on May 23, 1997.
(60) Provisional application No. 60/047,589, filed on May 23, 1997.
(60) Provisional application No. 60/047,593, filed on May 23, 1997.
(60) Provisional application No. 60/047,614, filed on May 23, 1997.
(60) Provisional application No. 60/043,578, filed on Apr. 11, 1997.
(60) Provisional application No. 60/043,576, filed on Apr. 11, 1997.
(60) Provisional application No. 60/047,501, filed on May 23, 1997.
(60) Provisional application No. 60/043,670, filed on Apr. 11, 1997.
(60) Provisional application No. 60/056,632, filed on Aug. 22, 1997.
(60) Provisional application No. 60/056,664, filed on Aug. 22, 1997.
(60) Provisional application No. 60/056,876, filed on Aug. 22, 1997.
(60) Provisional application No. 60/056,881, filed on Aug. 22, 1997.
(60) Provisional application No. 60/056,909, filed on Aug. 22, 1997.
(60) Provisional application No. 60/056,875, filed on Aug. 22, 1997.
(60) Provisional application No. 60/056,862, filed on Aug. 22, 1997.
(60) Provisional application No. 60/056,887, filed on Aug. 22, 1997.
(60) Provisional application No. 60/056,908, filed on Aug. 22, 1997.
(60) Provisional application No. 60/048,964, filed on Jun. 6, 1997.
(60) Provisional application No. 60/057,650, filed on Sep. 5, 1997.
(60) Provisional application No. 60/056,884, filed on Aug. 22, 1997.
(60) Provisional application No. 60/190,068, filed on Mar. 17, 2000.
(60) Provisional application No. 60/040,161, filed on Mar. 7, 1997.
(60) Provisional application No. 60/040,162, filed on Mar. 7, 1997.
(60) Provisional application No. 60/040,333, filed on Mar. 7, 1997.
(60) Provisional application No. 60/038,621, filed on Mar. 7, 1997.
(60) Provisional application No. 60/040,626, filed on Mar. 7, 1997.
(60) Provisional application No. 60/040,334, filed on Mar. 7, 1997.
(60) Provisional application No. 60/040,336, filed on Mar. 7, 1997.
(60) Provisional application No. 60/040,163, filed on Mar. 7, 1997.
(60) Provisional application No. 60/047,600, filed on May 23, 1997.
(60) Provisional application No. 60/047,615, filed on May 23, 1997.
(60) Provisional application No. 60/047,597, filed on May 23, 1997.
(60) Provisional application No. 60/047,502, filed on May 23, 1997.
(60) Provisional application No. 60/047,633, filed on May 23, 1997.
(60) Provisional application No. 60/047,583, filed on May 23, 1997.
(60) Provisional application No. 60/047,617, filed on May 23, 1997.
(60) Provisional application No. 60/047,618, filed on May 23, 1997.
(60) Provisional application No. 60/047,503, filed on May 23, 1997.
(60) Provisional application No. 60/047,592, filed on May 23, 1997.
(60) Provisional application No. 60/047,581, filed on May 23, 1997.
(60) Provisional application No. 60/047,584, filed on May 23, 1997.
(60) Provisional application No. 60/047,500, filed on May 23, 1997.
(60) Provisional application No. 60/047,587, filed on May 23, 1997.
(60) Provisional application No. 60/047,492, filed on May 23, 1997.
(60) Provisional application No. 60/047,598, filed on May 23, 1997.
(60) Provisional application No. 60/047,613, filed on May 23, 1997.
(60) Provisional application No. 60/047,582, filed on May 23, 1997.
(60) Provisional application No. 60/047,596, filed on May 23, 1997.
(60) Provisional application No. 60/047,582, filed on May 23, 1997.
(60) Provisional application No. 60/047,612, filed on May 23, 1997.
(60) Provisional application No. 60/047,632, filed on May 23, 1997.
(60) Provisional application No. 60/047,601, filed on May 23, 1997.
(60) Provisional application No. 60/043,580, filed on Apr. 11, 1997.
(60) Provisional application No. 60/043,568, filed on Apr. 11, 1997.
(60) Provisional application No. 60/043,314, filed on Apr. 11, 1997.
(60) Provisional application No. 60/043,569, filed on Apr. 11, 1997.
(60) Provisional application No. 60/043,311, filed on Apr. 11, 1997.
(60) Provisional application No. 60/043,671, filed on Apr. 11, 1997.
(60) Provisional application No. 60/043,674, filed on Apr. 11, 1997.
(60) Provisional application No. 60/043,669, filed on Apr. 11, 1997.
(60) Provisional application No. 60/043,312, filed on Apr. 11, 1997.
(60) Provisional application No. 60/043,313, filed on Apr. 11, 1997.
(60) Provisional application No. 60/043,672, filed on Apr. 11, 1997.
(60) Provisional application No. 60/043,315, filed on Apr. 11, 1997.
(60) Provisional application No. 60/048,974, filed on Jun. 6, 1997.
(60) Provisional application No. 60/056,886, filed on Aug. 22, 1997.
(60) Provisional application No. 60/056,877, filed on Aug. 22, 1997.
(60) Provisional application No. 60/056,889, filed on Aug. 22, 1997.
(60) Provisional application No. 60/056,893, filed on Aug. 22, 1997.
(60) Provisional application No. 60/056,630, filed on Aug. 22, 1997.
(60) Provisional application No. 60/056,878, filed on Aug. 22, 1997.
(60) Provisional application No. 60/056,662, filed on Aug. 22, 1997.
(60) Provisional application No. 60/056,872, filed on Aug. 22, 1997.
(60) Provisional application No. 60/056,882, filed on Aug. 22, 1997.
(60) Provisional application No. 60/056,637, filed on Aug. 22, 1997.
(60) Provisional application No. 60/056,903, filed on Aug. 22, 1997.
(60) Provisional application No. 60/056,888, filed on Aug. 22, 1997.
(60) Provisional application No. 60/056,879, filed on Aug. 22, 1997.
(60) Provisional application No. 60/056,880, filed on Aug. 22, 1997.
(60) Provisional application No. 60/056,894, filed on Aug. 22, 1997.
(60) Provisional application No. 60/056,911, filed on Aug. 22, 1997.
(60) Provisional application No. 60/056,636, filed on Aug. 22, 1997.
(60) Provisional application No. 60/056,874, filed on Aug. 22, 1997.
(60) Provisional application No. 60/056,910, filed on Aug. 22, 1997.
(60) Provisional application No. 60/056,864, filed on Aug. 22, 1997.
(60) Provisional application No. 60/056,631, filed on Aug. 22, 1997.
(60) Provisional application No. 60/056,845, filed on Aug. 22, 1997.
(60) Provisional application No. 60/056,892, filed on Aug. 22, 1997.
(60) Provisional application No. 60/057,761, filed on Sep. 5, 1997.
(60) Provisional application No. 60/047,595, filed on May 23, 1997.
(60) Provisional application No. 60/047,599, filed on May 23, 1997.
(60) Provisional application No. 60/047,588, filed on May 23, 1997.
(60) Provisional application No. 60/047,585, filed on May 23, 1997.
(60) Provisional application No. 60/047,586, filed on May 23, 1997.
(60) Provisional application No. 60/047,590, filed on May 23, 1997.
(60) Provisional application No. 60/047,594, filed on May 23, 1997.
(60) Provisional application No. 60/047,589, filed on May 23, 1997.
(60) Provisional application No. 60/047,593, filed on May 23, 1997.
(60) Provisional application No. 60/047,614, filed on May 23, 1997.
(60) Provisional application No. 60/043,578, filed on Apr. 11, 1997.
(60) Provisional application No. 60/043,576, filed on Apr. 11, 1997.
(60) Provisional application No. 60/047,501, filed on May 23, 1997.
(60) Provisional application No. 60/043,670, filed on Apr. 11, 1997.
(60) Provisional application No. 60/056,632, filed on Aug. 22, 1997.
(60) Provisional application No. 60/056,664, filed on Aug. 22, 1997.
(60) Provisional application No. 60/056,876, filed on Aug. 22, 1997.
(60) Provisional application No. 60/056,881, filed on Aug. 22, 1997.
(60) Provisional application No. 60/056,909, filed on Aug. 22, 1997.
(60) Provisional application No. 60/056,875, filed on Aug. 22, 1997.
(60) Provisional application No. 60/056,862, filed on Aug. 22, 1997.
(60) Provisional application No. 60/056,887, filed on Aug. 22, 1997.
(60) Provisional application No. 60/056,908, filed on Aug. 22, 1997.
(60) Provisional application No. 60/048,964, filed on Jun. 6, 1997.
(60) Provisional application No. 60/057,650, filed on Sep. 5, 1997.
(60) Provisional application No. 60/056,884, filed on Aug. 22, 1997.
(60) Provisional application No. 60/057,669, filed on Sep. 5, 1997.
(60) Provisional application No. 60/049,610, filed on Jun. 13, 1997.
(60) Provisional application No. 60/061,060, filed on Oct. 2, 1997.
(60) Provisional application No. 60/051,926, filed on Jul. 8, 1997.
(60) Provisional application No. 60/052,874, filed on Jul. 16, 1997.
(60) Provisional application No. 60/058,785, filed on Sep. 12, 1997.
(60) Provisional application No. 60/055,724, filed on Aug. 18, 1997.
(60) Provisional application No. 60/265,583, filed on Feb. 2, 2001.
(60) Provisional application No. 60/265,583, filed on Feb. 2, 2001.
(60) Provisional application No. 60/265,583, filed on Feb. 2, 2001.
(60) Provisional application No. 60/265,583, filed on Feb. 2, 2001.
(60) Provisional application No. 60/040,762, filed on Mar. 14, 1997.
(60) Provisional application No. 60/040,710, filed on Mar. 14, 1997.
(60) Provisional application No. 60/050,934, filed on May 30, 1997.
(60) Provisional application No. 60/048,100, filed on May 30, 1997.
(60) Provisional application No. 60/048,357, filed on May 30, 1997.
(60) Provisional application No. 60/048,189, filed on May 30, 1997.
(60) Provisional application No. 60/057,765, filed on Sep. 5, 1997.
(60) Provisional application No. 60/048,970, filed on Jun. 6, 1997.
(60) Provisional application No. 60/068,368, filed on Dec. 19, 1997.
(60) Provisional application No. 60/041,277, filed on Mar. 21, 1997.
(60) Provisional application No. 60/042,344, filed on Mar. 21, 1997.
(60) Provisional application No. 60/041,276, filed on Mar. 21, 1997.
(60) Provisional application No. 60/041,281, filed on Mar. 21, 1997.
(60) Provisional application No. 60/048,094, filed on May 30, 1997.
(60) Provisional application No. 60/048,350, filed on May 30, 1997.
(60) Provisional application No. 60/048,188, filed on May 30, 1997.
(60) Provisional application No. 60/048,135, filed on May 30, 1997.
(60) Provisional application No. 60/050,937, filed on May 30, 1997.
(60) Provisional application No. 60/048,187, filed on May 30, 1997.
(60) Provisional application No. 60/048,099, filed on May 30, 1997.
(60) Provisional application No. 60/048,352, filed on May 30, 1997.
(60) Provisional application No. 60/048,186, filed on May 30, 1997.
(60) Provisional application No. 60/048,069, filed on May 30, 1997.
(60) Provisional application No. 60/048,095, filed on May 30, 1997.
(60) Provisional application No. 60/048,131, filed on May 30, 1997.
(60) Provisional application No. 60/048,096, filed on May 30, 1997.
(60) Provisional application No. 60/048,355, filed on May 30, 1997.
(60) Provisional application No. 60/048,160, filed on May 30, 1997.
(60) Provisional application No. 60/048,351, filed on May 30, 1997.
(60) Provisional application No. 60/048,154, filed on May 30, 1997.
(60) Provisional application No. 60/054,804, filed on Aug. 5, 1997.
(60) Provisional application No. 60/056,370, filed on Aug. 19, 1997.
(60) Provisional application No. 60/060,862, filed on Oct. 2, 1997.
(60) Provisional application No. 60/042,726, filed on Apr. 8, 1997.
(60) Provisional application No. 60/042,727, filed on Apr. 8, 1997.
(60) Provisional application No. 60/042,728, filed on Apr. 8, 1997.
(60) Provisional application No. 60/042,754, filed on Apr. 8, 1997.
(60) Provisional application No. 60/042,825, filed on Apr. 8, 1997.
(60) Provisional application No. 60/048,068, filed on May 30, 1997.
(60) Provisional application No. 60/048,070, filed on May 30, 1997.
(60) Provisional application No. 60/048,184, filed on May 30, 1997.
(60) Provisional application No. 60/042,726, filed on Apr. 8, 1997.
(60) Provisional application No. 60/042,727, filed on Apr. 8, 1997.
(60) Provisional application No. 60/042,728, filed on Apr. 8, 1997.
(60) Provisional application No. 60/042,754, filed on Apr. 8, 1997.
(60) Provisional application No. 60/042,825, filed on Apr. 8, 1997.
(60) Provisional application No. 60/048,068, filed on May 30, 1997.
(60) Provisional application No. 60/048,070, filed on May 30, 1997.
(60) Provisional application No. 60/048,184, filed on May 30, 1997.
(60) Provisional application No. 60/044,039, filed on May 30, 1997.
(60) Provisional application No. 60/048,093, filed on May 30, 1997.
(60) Provisional application No. 60/048,190, filed on May 30, 1997.
(60) Provisional application No. 60/050,935, filed on May 30, 1997.
(60) Provisional application No. 60/048,101, filed on May 30, 1997.
(60) Provisional application No. 60/048,356, filed on May 30, 1997.
(60) Provisional application No. 60/056,250, filed on Aug. 29, 1997.
(60) Provisional application No. 60/056,296, filed on Aug. 29, 1997.
(60) Provisional application No. 60/056,293, filed on Aug. 29, 1997.
(60) Provisional application No. 60/048,885, filed on Jun. 6, 1997.
(60) Provisional application No. 60/049,375, filed on Jun. 6, 1997.
(60) Provisional application No. 60/048,881, filed on Jun. 6, 1997.
(60) Provisional application No. 60/048,880, filed on Jun. 6, 1997.
(60) Provisional application No. 60/048,896, filed on Jun. 6, 1997.
(60) Provisional application No. 60/049,020, filed on Jun. 6, 1997.
(60) Provisional application No. 60/048,876, filed on Jun. 6, 1997.
(60) Provisional application No. 60/048,895, filed on Jun. 6, 1997.
(60) Provisional application No. 60/048,884, filed on Jun. 6, 1997.
(60) Provisional application No. 60/048,894, filed on Jun. 6, 1997.
(60) Provisional application No. 60/048,971, filed on Jun. 6, 1997.
(60) Provisional application No. 60/048,964, filed on Jun. 6, 1997.
(60) Provisional application No. 60/048,882, filed on Jun. 6, 1997.
(60) Provisional application No. 60/048,899, filed on Jun. 6, 1997.
(60) Provisional application No. 60/048,893, filed on Jun. 6, 1997.
(60) Provisional application No. 60/048,900, filed on Jun. 6, 1997.
(60) Provisional application No. 60/048,901, filed on Jun. 6, 1997.
(60) Provisional application No. 60/048,892, filed on Jun. 6, 1997.
(60) Provisional application No. 60/048,915, filed on Jun. 6, 1997.
(60) Provisional application No. 60/049,019, filed on Jun. 6, 1997.
(60) Provisional application No. 60/048,970, filed on Jun. 6, 1997.
(60) Provisional application No. 60/048,972, filed on Jun. 6, 1997.
(60) Provisional application No. 60/048,916, filed on Jun. 6, 1997.
(60) Provisional application No. 60/049,373, filed on Jun. 6, 1997.
(60) Provisional application No. 60/048,875, filed on Jun. 6, 1997.
(60) Provisional application No. 60/049,374, filed on Jun. 6, 1997.
(60) Provisional application No. 60/048,917, filed on Jun. 6, 1997.
(60) Provisional application No. 60/048,949, filed on Jun. 6, 1997.
(60) Provisional application No. 60/048,974, filed on Jun. 6, 1997.
(60) Provisional application No. 60/048,883, filed on Jun. 6, 1997.
(60) Provisional application No. 60/048,897, filed on Jun. 6, 1997.
(60) Provisional application No. 60/048,898, filed on Jun. 6, 1997.
(60) Provisional application No. 60/048,962, filed on Jun. 6, 1997.
(60) Provisional application No. 60/048,963, filed on Jun. 6, 1997.
(60) Provisional application No. 60/048,877, filed on Jun. 6, 1997.
(60) Provisional application No. 60/048,878, filed on Jun. 6, 1997.
(60) Provisional application No. 60/057,645, filed on Sep. 5, 1997.
(60) Provisional application No. 60/057,642, filed on Sep. 5, 1997.
(60) Provisional application No. 60/057,668, filed on Sep. 5, 1997.
(60) Provisional application No. 60/057,635, filed on Sep. 5, 1997.
(60) Provisional application No. 60/057,627, filed on Sep. 5, 1997.
(60) Provisional application No. 60/057,667, filed on Sep. 5, 1997.
(60) Provisional application No. 60/057,666, filed on Sep. 5, 1997.
(60) Provisional application No. 60/057,764, filed on Sep. 5, 1997.
(60) Provisional application No. 60/057,643, filed on Sep. 5, 1997.
(60) Provisional application No. 60/057,769, filed on Sep. 5, 1997.
(60) Provisional application No. 60/057,763, filed on Sep. 5, 1997.
(60) Provisional application No. 60/057,650, filed on Sep. 5, 1997.
(60) Provisional application No. 60/057,584, filed on Sep. 5, 1997.
(60) Provisional application No. 60/057,647, filed on Sep. 5, 1997.
(60) Provisional application No. 60/057,661, filed on Sep. 5, 1997.
(60) Provisional application No. 60/057,662, filed on Sep. 5, 1997.
(60) Provisional application No. 60/057,646, filed on Sep. 5, 1997.
(60) Provisional application No. 60/057,654, filed on Sep. 5, 1997.
(60) Provisional application No. 60/057,651, filed on Sep. 5, 1997.
(60) Provisional application No. 60/057,644, filed on Sep. 5, 1997.
(60) Provisional application No. 60/057,765, filed on Sep. 5, 1997.
(60) Provisional application No. 60/057,762, filed on Sep. 5, 1997.
(60) Provisional application No. 60/057,775, filed on Sep. 5, 1997.
(60) Provisional application No. 60/057,648, filed on Sep. 5, 1997.
(60) Provisional application No. 60/057,774, filed on Sep. 5, 1997.
(60) Provisional application No. 60/057,649, filed on Sep. 5, 1997.
(60) Provisional application No. 60/057,770, filed on Sep. 5, 1997.
(60) Provisional application No. 60/057,771, filed on Sep. 5, 1997.
(60) Provisional application No. 60/057,761, filed on Sep. 5, 1997.
(60) Provisional application No. 60/057,760, filed on Sep. 5, 1997.
(60) Provisional application No. 60/057,776, filed on Sep. 5, 1997.
(60) Provisional application No. 60/057,778, filed on Sep. 5, 1997.
(60) Provisional application No. 60/057,629, filed on Sep. 5, 1997.
(60) Provisional application No. 60/057,628, filed on Sep. 5, 1997.
(60) Provisional application No. 60/057,777, filed on Sep. 5, 1997.
(60) Provisional application No. 60/057,634, filed on Sep. 5, 1997.

(51) Int. Cl. C12Q 1/68; G01N 33/567; C07H 21/04; C12P 21/06; C07K 14/72; C07K 14/62; C07K 16/26

(52) U.S. Cl. 536/23.5; 435/6; 435/69.1; 435/320.1; 435/325; 435/7.2; 530/303; 530/350; 530/388.24

(57) ABSTRACT

The present invention relates to human secreted polypeptides, and isolated nucleic acid molecules encoding said polypeptides, useful for diagnosing and treating diabetes mellitus and/or conditions related to diabetes. Antibodies that bind these polypeptides are also encompassed by the present invention. Also encompassed by the invention are vectors, host cells, and recombinant and synthetic methods for producing said polynucleotides, polypeptides, and/or antibodies. The invention further encompasses screening methods for identifying agonists and antagonists of polynucleotides and polypeptides of the invention. The present invention further encompasses methods and compositions for inhibiting or enhancing the production and function of the polypeptides of the present invention.

### RELATED APPLICATIONS

[0001] This application is a continuation-in-part of PCT/US02/08124, filed Mar. 19, 2002, which in turn claims benefit of the following:

| Application:: | Continuity Type:: | Parent Application:: | Parent Filing Date:: |
|---|---|---|---|
| PCT/US02/08124 | Continuation-in-part of | 10/100,683 | Mar. 19, 2002 |
| 10/100,683 | Non-provisional of | 60/277,340 | Mar. 21, 2001 |
| 10/100,683 | Non-provisional of | 60/306,171 | Jul. 19, 2001 |
| 10/100,683 | Non-provisional of | 60/331,287 | Nov. 13, 2001 |
| 10/100,683 | Continuation-in-part of | 09/981,876 | Oct. 19, 2001 |
| 09/981,876 | Divisional of | 09/621,011 | Jul. 20, 2000 |
| 09/621,011 | Continuation of | 09/148,545 | Sep. 04, 1998 |
| 09/148,545 | Continuation-in-part of | PCT/US98/04482 | Mar. 06, 1998 |
| 10/100,683 | Continuation-in-part of | 09/621,011 | Jul. 20, 2000 |
| 09/621,011 | Continuation of | 09/148,545 | Sep. 04, 1998 |
| 09/148,545 | Continuation-in-part of | PCT/US98/04482 | Mar. 06, 1998 |
| 10/100,683 | Continuation-in-part of | 09/148,545 | Sep. 04, 1998 |
| 09/148,545 | Continuation-in-part of | PCT/US98/04482 | Mar. 06, 1998 |
| 10/100,683 | Continuation-in-part of | PCT/US98/04482 | Mar. 06, 1998 |
| PCT/US98/04482 | Non-provisional of | 60/040,162 | Mar. 07, 1997 |
| PCT/US98/04482 | Non-provisional of | 60/040,333 | Mar. 07, 1997 |
| PCT/US98/04482 | Non-provisional of | 60/038,621 | Mar. 07, 1997 |
| PCT/US98/04482 | Non-provisional of | 60/040,161 | Mar. 07, 1997 |
| PCT/US98/04482 | Non-provisional of | 60/040,626 | Mar. 07, 1997 |
| PCT/US98/04482 | Non-provisional of | 60/040,334 | Mar. 07, 1997 |
| PCT/US98/04482 | Non-provisional of | 60/040,336 | Mar. 07, 1997 |
| PCT/US98/04482 | Non-provisional of | 60/040,163 | Mar. 07, 1997 |
| PCT/US98/04482 | Non-provisional of | 60/047,615 | May 23, 1997 |
| PCT/US98/04482 | Non-provisional of | 60/047,600 | May 23, 1997 |
| PCT/US98/04482 | Non-provisional of | 60/047,597 | May 23, 1997 |
| PCT/US98/04482 | Non-provisional of | 60/047,502 | May 23, 1997 |
| PCT/US98/04482 | Non-provisional of | 60/047,633 | May 23, 1997 |
| PCT/US98/04482 | Non-provisional of | 60/047,583 | May 23, 1997 |
| PCT/US98/04482 | Non-provisional of | 60/047,617 | May 23, 1997 |
| PCT/US98/04482 | Non-provisional of | 60/047,618 | May 23, 1997 |
| PCT/US98/04482 | Non-provisional of | 60/047,503 | May 23, 1997 |
| PCT/US98/04482 | Non-provisional of | 60/047,592 | May 23, 1997 |
| PCT/US98/04482 | Non-provisional of | 60/047,581 | May 23, 1997 |
| PCT/US98/04482 | Non-provisional of | 60/047,584 | May 23, 1997 |
| PCT/US98/04482 | Non-provisional of | 60/047,500 | May 23, 1997 |
| PCT/US98/04482 | Non-provisional of | 60/047,587 | May 23, 1997 |
| PCT/US98/04482 | Non-provisional of | 60/047,492 | May 23, 1997 |
| PCT/US98/04482 | Non-provisional of | 60/047,598 | May 23, 1997 |
| PCT/US98/04482 | Non-provisional of | 60/047,613 | May 23, 1997 |
| PCT/US98/04482 | Non-provisional of | 60/047,582 | May 23, 1997 |
| PCT/US98/04482 | Non-provisional of | 60/047,596 | May 23, 1997 |
| PCT/US98/04482 | Non-provisional of | 60/047,612 | May 23, 1997 |
| PCT/US98/04482 | Non-provisional of | 60/047,632 | May 23, 1997 |
| PCT/US98/04482 | Non-provisional of | 60/047,601 | May 23, 1997 |
| PCT/US98/04482 | Non-provisional of | 60/043,580 | Apr. 11, 1997 |
| PCT/US98/04482 | Non-provisional of | 60/043,568 | Apr. 11, 1997 |
| PCT/US98/04482 | Non-provisional of | 60/043,314 | Apr. 11, 1997 |
| PCT/US98/04482 | Non-provisional of | 60/043,569 | Apr. 11, 1997 |
| PCT/US98/04482 | Non-provisional of | 60/043,311 | Apr. 11, 1997 |
| PCT/US98/04482 | Non-provisional of | 60/043,671 | Apr. 11, 1997 |
| PCT/US98/04482 | Non-provisional of | 60/043,674 | Apr. 11, 1997 |
| PCT/US98/04482 | Non-provisional of | 60/043,669 | Apr. 11, 1997 |
| PCT/US98/04482 | Non-provisional of | 60/043,312 | Apr. 11, 1997 |
| PCT/US98/04482 | Non-provisional of | 60/043,313 | Apr. 11, 1997 |
| PCT/US98/04482 | Non-provisional of | 60/043,672 | Apr. 11, 1997 |
| PCT/US98/04482 | Non-provisional of | 60/043,315 | Apr. 11, 1997 |
| PCT/US98/04482 | Non-provisional of | 60/048,974 | Jun. 06, 1997 |
| PCT/US98/04482 | Non-provisional of | 60/056,886 | Aug. 22, 1997 |
| PCT/US98/04482 | Non-provisional of | 60/056,877 | Aug. 22, 1997 |
| PCT/US98/04482 | Non-provisional of | 60/056,889 | Aug. 22, 1997 |
| PCT/US98/04482 | Non-provisional of | 60/056,893 | Aug. 22, 1997 |
| PCT/US98/04482 | Non-provisional of | 60/056,630 | Aug. 22, 1997 |
| PCT/US98/04482 | Non-provisional of | 60/056,878 | Aug. 22, 1997 |
| PCT/US98/04482 | Non-provisional of | 60/056,662 | Aug. 22, 1997 |
| PCT/US98/04482 | Non-provisional of | 60/056,872 | Aug. 22, 1997 |
| PCT/US98/04482 | Non-provisional of | 60/056,882 | Aug. 22, 1997 |
| PCT/US98/04482 | Non-provisional of | 60/056,637 | Aug. 22, 1997 |
| PCT/US98/04482 | Non-provisional of | 60/056,903 | Aug. 22, 1997 |
| PCT/US98/04482 | Non-provisional of | 60/056,888 | Aug. 22, 1997 |
| PCT/US98/04482 | Non-provisional of | 60/056,879 | Aug. 22, 1997 |
| PCT/US98/04482 | Non-provisional of | 60/056,880 | Aug. 22, 1997 |
| PCT/US98/04482 | Non-provisional of | 60/056,894 | Aug. 22, 1997 |
| PCT/US98/04482 | Non-provisional of | 60/056,911 | Aug. 22, 1997 |
| PCT/US98/04482 | Non-provisional of | 60/056,636 | Aug. 22, 1997 |
| PCT/US98/04482 | Non-provisional of | 60/056,874 | Aug. 22, 1997 |
| PCT/US98/04482 | Non-provisional of | 60/056,910 | Aug. 22, 1997 |
| PCT/US98/04482 | Non-provisional of | 60/056,864 | Aug. 22, 1997 |
| PCT/US98/04482 | Non-provisional of | 60/056,631 | Aug. 22, 1997 |
| PCT/US98/04482 | Non-provisional of | 60/056,845 | Aug. 22, 1997 |
| PCT/US98/04482 | Non-provisional of | 60/056,892 | Aug. 22, 1997 |
| PCT/US98/04482 | Non-provisional of | 60/047,595 | May 23, 1997 |
| PCT/US98/04482 | Non-provisional of | 60/057,761 | Sep. 05, 1997 |
| PCT/US98/04482 | Non-provisional of | 60/047,599 | May 23, 1997 |
| PCT/US98/04482 | Non-provisional of | 60/047,588 | May 23, 1997 |
| PCT/US98/04482 | Non-provisional of | 60/047,585 | May 23, 1997 |
| PCT/US98/04482 | Non-provisional of | 60/047,586 | May 23, 1997 |
| PCT/US98/04482 | Non-provisional of | 60/047,590 | May 23, 1997 |
| PCT/US98/04482 | Non-provisional of | 60/047,594 | May 23, 1997 |
| PCT/US98/04482 | Non-provisional of | 60/047,589 | May 23, 1997 |
| PCT/US98/04482 | Non-provisional of | 60/047,593 | May 23, 1997 |
| PCT/US98/04482 | Non-provisional of | 60/047,614 | May 23, 1997 |
| PCT/US98/04482 | Non-provisional of | 60/043,578 | Apr. 11, 1997 |
| PCT/US98/04482 | Non-provisional of | 60/043,576 | Apr. 11, 1997 |
| PCT/US98/04482 | Non-provisional of | 60/047,501 | May 23, 1997 |
| PCT/US98/04482 | Non-provisional of | 60/043,670 | Apr. 11, 1997 |
| PCT/US98/04482 | Non-provisional of | 60/056,632 | Aug. 22, 1997 |
| PCT/US98/04482 | Non-provisional of | 60/056,664 | Aug. 22, 1997 |
| PCT/US98/04482 | Non-provisional of | 60/056,876 | Aug. 22, 1997 |
| PCT/US98/04482 | Non-provisional of | 60/056,881 | Aug. 22, 1997 |
| PCT/US98/04482 | Non-provisional of | 60/056,909 | Aug. 22, 1997 |
| PCT/US98/04482 | Non-provisional of | 60/056,875 | Aug. 22, 1997 |
| PCT/US98/04482 | Non-provisional of | 60/056,862 | Aug. 22, 1997 |
| PCT/US98/04482 | Non-provisional of | 60/056,887 | Aug. 22, 1997 |
| PCT/US98/04482 | Non-provisional of | 60/056,908 | Aug. 22, 1997 |
| PCT/US98/04482 | Non-provisional of | 60/048,964 | Jun. 06, 1997 |
| PCT/US98/04482 | Non-provisional of | 60/057,650 | Sep. 05, 1997 |
| PCT/US98/04482 | Non-provisional of | 60/056,884 | Aug. 22, 1997 |
| 10/100,683 | Continuation-in-part of | 09/882,171 | Jun. 18, 2001 |
| 09/882,171 | Non-provisional of | 60/190,068 | Mar. 17, 2000 |
| 09/882,171 | Continuation of | 09/809,391 | Mar. 16, 2001 |
| 09/809,391 | Continuation-in-part of | 09/149,476 | Sep. 08, 1998 |
| 09/149,476 | Continuation-in-part of | PCT/US98/04493 | Mar. 06, 1998 |
| 10/100,683 | Continuation-in-part of | 09/809,391 | Mar. 16, 2001 |
| 09/809,391 | Non-provisional of | 60/190,068 | Mar. 17, 2000 |
| 09/809,391 | Continuation-in-part of | 09/149,476 | Sep. 08, 1998 |
| 09/149,476 | Continuation-in-part of | PCT/US98/04493 | Mar. 06, 1998 |
| 10/100,683 | Continuation-in-part of | 09/149,476 | Sep. 08, 1998 |
| 09/149,476 | Continuation-in-part of | PCT/US98/04493 | Mar. 06, 1998 |
| 10/100,683 | Continuation-in-part of | PCT/US98/04493 | Mar. 06, 1998 |
| PCT/US98/04493 | Non-provisional of | 60/040,161 | Mar. 07, 1997 |
| PCT/US98/04493 | Non-provisional of | 60/040,162 | Mar. 07, 1997 |
| PCT/US98/04493 | Non-provisional of | 60/040,333 | Mar. 07, 1997 |
| PCT/US98/04493 | Non-provisional of | 60/038,621 | Mar. 07, 1997 |
| PCT/US98/04493 | Non-provisional of | 60/040,626 | Mar. 07, 1997 |
| PCT/US98/04493 | Non-provisional of | 60/040,334 | Mar. 07, 1997 |
| PCT/US98/04493 | Non-provisional of | 60/040,336 | Mar. 07, 1997 |
| PCT/US98/04493 | Non-provisional of | 60/040,163 | Mar. 07, 1997 |
| PCT/US98/04493 | Non-provisional of | 60/047,600 | May 23, 1997 |
| PCT/US98/04493 | Non-provisional of | 60/047,615 | May 23, 1997 |
| PCT/US98/04493 | Non-provisional of | 60/047,597 | May 23, 1997 |
| PCT/US98/04493 | Non-provisional of | 60/047,502 | May 23, 1997 |
| PCT/US98/04493 | Non-provisional of | 60/047,633 | May 23, 1997 |
| PCT/US98/04493 | Non-provisional of | 60/047,583 | May 23, 1997 |
| PCT/US98/04493 | Non-provisional of | 60/047,617 | May 23, 1997 |
| PCT/US98/04493 | Non-provisional of | 60/047,618 | May 23, 1997 |
| PCT/US98/04493 | Non-provisional of | 60/047,503 | May 23, 1997 |
| PCT/US98/04493 | Non-provisional of | 60/047,592 | May 23, 1997 |
| PCT/US98/04493 | Non-provisional of | 60/047,581 | May 23, 1997 |
| PCT/US98/04493 | Non-provisional of | 60/047,584 | May 23, 1997 |
| PCT/US98/04493 | Non-provisional of | 60/047,500 | May 23, 1997 |
| PCT/US98/04493 | Non-provisional of | 60/047,587 | May 23, 1997 |
| PCT/US98/04493 | Non-provisional of | 60/047,492 | May 23, 1997 |
| PCT/US98/04493 | Non-provisional of | 60/047,598 | May 23, 1997 |
| PCT/US98/04493 | Non-provisional of | 60/047,613 | May 23, 1997 |
| PCT/US98/04493 | Non-provisional of | 60/047,582 | May 23, 1997 |
| PCT/US98/04493 | Non-provisional of | 60/047,596 | May 23, 1997 |
| PCT/US98/04493 | Non-provisional of | 60/047,612 | May 23, 1997 |
| PCT/US98/04493 | Non-provisional of | 60/047,632 | May 23, 1997 |
| PCT/US98/04493 | Non-provisional of | 60/047,601 | May 23, 1997 |
| PCT/US98/04493 | Non-provisional of | 60/043,580 | Apr. 11, 1997 |
| PCT/US98/04493 | Non-provisional of | 60/043,568 | Apr. 11, 1997 |
| PCT/US98/04493 | Non-provisional of | 60/043,314 | Apr. 11, 1997 |
| PCT/US98/04493 | Non-provisional of | 60/043,569 | Apr. 11, 1997 |
| PCT/US98/04493 | Non-provisional of | 60/043,311 | Apr. 11, 1997 |
| PCT/US98/04493 | Non-provisional of | 60/043,671 | Apr. 11, 1997 |
| PCT/US98/04493 | Non-provisional of | 60/043,674 | Apr. 11, 1997 |
| PCT/US98/04493 | Non-provisional of | 60/043,669 | Apr. 11, 1997 |
| PCT/US98/04493 | Non-provisional of | 60/043,312 | Apr. 11, 1997 |
| PCT/US98/04493 | Non-provisional of | 60/043,313 | Apr. 11, 1997 |
| PCT/US98/04493 | Non-provisional of | 60/043,672 | Apr. 11, 1997 |
| PCT/US98/04493 | Non-provisional of | 60/043,315 | Apr. 11, 1997 |
| PCT/US98/04493 | Non-provisional of | 60/048,974 | Jun. 06, 1997 |
| PCT/US98/04493 | Non-provisional of | 60/056,886 | Aug. 22, 1997 |
| PCT/US98/04493 | Non-provisional of | 60/056,877 | Aug. 22, 1997 |
| PCT/US98/04493 | Non-provisional of | 60/056,889 | Aug. 22, 1997 |
| PCT/US98/04493 | Non-provisional of | 60/056,893 | Aug. 22, 1997 |
| PCT/US98/04493 | Non-provisional of | 60/056,630 | Aug. 22, 1997 |
| PCT/US98/04493 | Non-provisional of | 60/056,878 | Aug. 22, 1997 |
| PCT/US98/04493 | Non-provisional of | 60/056,662 | Aug. 22, 1997 |
| PCT/US98/04493 | Non-provisional of | 60/056,872 | Aug. 22, 1997 |
| PCT/US98/04493 | Non-provisional of | 60/056,882 | Aug. 22, 1997 |
| PCT/US98/04493 | Non-provisional of | 60/056,637 | Aug. 22, 1997 |
| PCT/US98/04493 | Non-provisional of | 60/056,903 | Aug. 22, 1997 |
| PCT/US98/04493 | Non-provisional of | 60/056,888 | Aug. 22, 1997 |
| PCT/US98/04493 | Non-provisional of | 60/056,879 | Aug. 22, 1997 |
| PCT/US98/04493 | Non-provisional of | 60/056,880 | Aug. 22, 1997 |
| PCT/US98/04493 | Non-provisional of | 60/056,894 | Aug. 22, 1997 |
| PCT/US98/04493 | Non-provisional of | 60/056,911 | Aug. 22, 1997 |
| PCT/US98/04493 | Non-provisional of | 60/056,636 | Aug. 22, 1997 |
| PCT/US98/04493 | Non-provisional of | 60/056,874 | Aug. 22, 1997 |
| PCT/US98/04493 | Non-provisional of | 60/056,910 | Aug. 22, 1997 |
| PCT/US98/04493 | Non-provisional of | 60/056,864 | Aug. 22, 1997 |
| PCT/US98/04493 | Non-provisional of | 60/056,631 | Aug. 22, 1997 |
| PCT/US98/04493 | Non-provisional of | 60/056,845 | Aug. 22, 1997 |
| PCT/US98/04493 | Non-provisional of | 60/056,892 | Aug. 22, 1997 |
| PCT/US98/04493 | Non-provisional of | 60/057,761 | Sep. 05, 1997 |
| PCT/US98/04493 | Non-provisional of | 60/047,595 | May 23, 1997 |
| PCT/US98/04493 | Non-provisional of | 60/047,599 | May 23, 1997 |
| PCT/US98/04493 | Non-provisional of | 60/047,588 | May 23, 1997 |
| PCT/US98/04493 | Non-provisional of | 60/047,585 | May 23, 1997 |
| PCT/US98/04493 | Non-provisional of | 60/047,586 | May 23, 1997 |
| PCT/US98/04493 | Non-provisional of | 60/047,590 | May 23, 1997 |
| PCT/US98/04493 | Non-provisional of | 60/047,594 | May 23, 1997 |
| PCT/US98/04493 | Non-provisional of | 60/047,589 | May 23, 1997 |
| PCT/US98/04493 | Non-provisional of | 60/047,593 | May 23, 1997 |
| PCT/US98/04493 | Non-provisional of | 60/047,614 | May 23, 1997 |
| PCT/US98/04493 | Non-provisional of | 60/043,578 | Apr. 11, 1997 |
| PCT/US98/04493 | Non-provisional of | 60/043,576 | Apr. 11, 1997 |
| PCT/US98/04493 | Non-provisional of | 60/047,501 | May 23, 1997 |
| PCT/US98/04493 | Non-provisional of | 60/043,670 | Apr. 11, 1997 |
| PCT/US98/04493 | Non-provisional of | 60/056,632 | Aug. 22, 1997 |
| PCT/US98/04493 | Non-provisional of | 60/056,664 | Aug. 22, 1997 |
| PCT/US98/04493 | Non-provisional of | 60/056,876 | Aug. 22, 1997 |
| PCT/US98/04493 | Non-provisional of | 60/056,881 | Aug. 22, 1997 |
| PCT/US98/04493 | Non-provisional of | 60/056,909 | Aug. 22, 1997 |
| PCT/US98/04493 | Non-provisional of | 60/056,875 | Aug. 22, 1997 |
| PCT/US98/04493 | Non-provisional of | 60/056,862 | Aug. 22, 1997 |
| PCT/US98/04493 | Non-provisional of | 60/056,887 | Aug. 22, 1997 |
| PCT/US98/04493 | Non-provisional of | 60/056,908 | Aug. 22, 1997 |
| PCT/US98/04493 | Non-provisional of | 60/048,964 | Jun. 06, 1997 |
| PCT/US98/04493 | Non-provisional of | 60/057,650 | Sep. 05, 1997 |
| PCT/US98/04493 | Non-provisional of | 60/056,884 | Aug. 22, 1997 |
| PCT/US98/04493 | Non-provisional of | 60/057,669 | Sep. 05, 1997 |
| PCT/US98/04493 | Non-provisional of | 60/049,610 | Jun. 13, 1997 |
| PCT/US98/04493 | Non-provisional of | 60/061,060 | Oct. 02, 1997 |
| PCT/US98/04493 | Non-provisional of | 60/051,926 | Jul. 08, 1997 |
| PCT/US98/04493 | Non-provisional of | 60/052,874 | Jul. 16, 1997 |
| PCT/US98/04493 | Non-provisional of | 60/058,785 | Sep. 12, 1997 |
| PCT/US98/04493 | Non-provisional of | 60/055,724 | Aug. 18, 1997 |
| 10/100,683 | Continuation-in-part of | 10/058,993 | Jan. 30, 2002 |
| 10/058,993 | Non-provisional of | 60/265,583 | Feb. 02, 2001 |
| 10/058,993 | Continuation-in-part of | 09/852,659 | May 11, 2001 |
| 09/852,659 | Continuation-in-part of | 09/152,060 | Sep. 11, 1998 |
| 09/152,060 | Continuation-in-part of | PCT/US98/04858 | Mar. 12, 1998 |
| 10/058,993 | Continuation-in-part of | 09/853,161 | May 11, 2001 |
| 09/853,161 | Continuation-in-part of | 09/152,060 | Sep. 11, 1998 |
| 09/152,060 | Continuation-in-part of | PCT/US98/04858 | Mar. 12, 1998 |
| 10/058,993 | Continuation-in-part of | 09/852,797 | May 11, 2001 |
| 09/852,797 | Continuation-in-part of | 09/152,060 | Sep. 11, 1998 |
| 09/152,060 | Continuation-in-part of | PCT/US98/04858 | Mar. 12, 1998 |
| 10/100,683 | Continuation-in-part of | 09/852,659 | May 11, 2001 |
| 09/852,659 | Non-provisional of | 60/265,583 | Feb. 02, 2001 |
| 09/852,659 | Continuation-in-part of | 09/152,060 | Sep. 11, 1998 |
| 09/152,060 | Continuation-in-part of | PCT/US98/04858 | Mar. 12, 1998 |
| 10/100,683 | Continuation-in-part of | 09/853,161 | May 11, 2001 |
| 09/853,161 | Non-provisional of | 60/265,583 | Feb. 02, 2001 |
| 09/853,161 | Continuation-in-part of | 09/152,060 | Sep. 11, 1998 |
| 09/152,060 | Continuation-in-part of | PCT/US98/04858 | Mar. 12, 1998 |
| 10/100,683 | Continuation-in-part of | 09/852,797 | May 11, 2001 |
| 09/852,797 | Non-provisional of | 60/265,583 | Feb. 02, 2001 |
| 09/852,797 | Continuation-in-part of | 09/152,060 | Sep. 11, 1998 |
| 09/152,060 | Continuation-in-part of | PCT/US98/04858 | Mar. 12, 1998 |
| 10/100,683 | Continuation-in-part of | 09/152,060 | Sep. 11, 1998 |
| 09/152,060 | Continuation-in-part of | PCT/US98/04858 | Mar. 12, 1998 |
| 10/100,683 | Continuation-in-part of | PCT/US98/04858 | Mar. 12, 1998 |
| PCT/US98/04858 | Non-provisional of | 60/040,762 | Mar. 14, 1997 |
| PCT/US98/04858 | Non-provisional of | 60/040,710 | Mar. 14, 1997 |
| PCT/US98/04858 | Non-provisional of | 60/050,934 | May 30, 1997 |
| PCT/US98/04858 | Non-provisional of | 60/048,100 | May 30, 1997 |
| PCT/US98/04858 | Non-provisional of | 60/048,357 | May 30, 1997 |
| PCT/US98/04858 | Non-provisional of | 60/048,189 | May 30, 1997 |
| PCT/US98/04858 | Non-provisional of | 60/057,765 | Sep. 05, 1997 |
| PCT/US98/04858 | Non-provisional of | 60/048,970 | Jun. 06, 1997 |
| PCT/US98/04858 | Non-provisional of | 60/068,368 | Dec. 19, 1997 |
| 10/100,683 | Continuation-in-part of | 10/059,395 | Jan. 31, 2002 |
| 10/059,395 | Divisional of | 09/966,262 | Oct. 01, 2001 |
| 09/966,262 | Continuation of | 09/154,707 | Sep. 17, 1998 |
| 09/154,707 | Continuation-in-part of | PCT/US98/05311 | Mar. 19, 1998 |
| 10/100,683 | Continuation-in-part of | 09/984,245 | Oct. 29, 2001 |
| 09/984,245 | Divisional of | 09/154,707 | Sep. 17, 1998 |
| 09/154,707 | Continuation-in-part of | PCT/US98/05311 | Mar. 19, 1998 |
| 10/100,683 | Continuation-in-part of | 09/983,966 | Oct. 26, 2001 |
| 09/983,966 | Divisional of | 09/154,707 | Sep. 17, 1998 |
| 09/154,707 | Continuation-in-part of | PCT/US98/05311 | Mar. 19, 1998 |
| 10/100,683 | Continuation-in-part of | 09/966,262 | Oct. 01, 2001 |
| 09/966,262 | Continuation of of | 09/154,707 | Sep. 17, 1998 |
| 09/154,707 | Continuation-in-part of | PCT/US98/05311 | Mar. 19, 1998 |
| 10/100,683 | Continuation-in-part of | 09/154,707 | Sep. 17, 1998 |
| 09/154,707 | Continuation-in-part of | PCT/US98/05311 | Mar. 19, 1998 |
| 10/100,683 | Continuation-in-part of | PCT/US98/05311 | Mar. 03, 1998 |
| PCT/US98/05311 | Non-provisional of | 60/041,277 | Mar. 21, 1997 |
| PCT/US98/05311 | Non-provisional of | 60/042,344 | Mar. 21, 1997 |
| PCT/US98/05311 | Non-provisional of | 60/041,276 | Mar. 21, 1997 |
| PCT/US98/05311 | Non-provisional of | 60/041,281 | Mar. 21, 1997 |
| PCT/US98/05311 | Non-provisional of | 60/048,094 | May 30, 1997 |
| PCT/US98/05311 | Non-provisional of | 60/048,350 | May 30, 1997 |
| PCT/US98/05311 | Non-provisional of | 60/048,188 | May 30, 1997 |
| PCT/US98/05311 | Non-provisional of | 60/048,135 | May 30, 1997 |
| PCT/US98/05311 | Non-provisional of | 60/050,937 | May 30, 1997 |
| PCT/US98/05311 | Non-provisional of | 60/048,187 | May 30, 1997 |
| PCT/US98/05311 | Non-provisional of | 60/048,099 | May 30, 1997 |
| PCT/US98/05311 | Non-provisional of | 60/048,352 | May 30, 1997 |
| PCT/US98/05311 | Non-provisional of | 60/048,186 | May 30, 1997 |
| PCT/US98/05311 | Non-provisional of | 60/048,069 | May 30, 1997 |
| PCT/US98/05311 | Non-provisional of | 60/048,095 | May 30, 1997 |
| PCT/US98/05311 | Non-provisional of | 60/048,131 | May 30, 1997 |
| PCT/US98/05311 | Non-provisional of | 60/048,096 | May 30, 1997 |
| PCT/US98/05311 | Non-provisional of | 60/048,355 | May 30, 1997 |
| PCT/US98/05311 | Non-provisional of | 60/048,160 | May 30, 1997 |
| PCT/US98/05311 | Non-provisional of | 60/048,351 | May 30, 1997 |
| PCT/US98/05311 | Non-provisional of | 60/048,154 | May 30, 1997 |
| PCT/US98/05311 | Non-provisional of | 60/054,804 | Aug. 05, 1997 |
| PCT/US98/05311 | Non-provisional of | 60/056,370 | Aug. 19, 1997 |
| PCT/US98/05311 | Non-provisional of | 60/060,862 | Oct. 02, 1997 |
| 10/100,683 | Continuation-in-part of | 09/814,122 | Mar. 22, 2001 |
| 09/814,122 | Continuation of | 09/577,145 | May 24, 2000 |
| 09/577,145 | Continuation of | 09/166,780 | Oct. 06, 1998 |
| 09/166,780 | Continuation-in-part of | PCT/US98/06801 | Apr. 07, 1998 |
| 10/100,683 | Continuation-in-part of | PCT/US98/06801 | Apr. 07, 1998 |
| PCT/US98/06801 | Non-provisional of | 60/042,726 | Apr. 08, 1997 |
| PCT/US98/06801 | Non-provisional of | 60/042,727 | Apr. 08, 1997 |
| PCT/US98/06801 | Non-provisional of | 60/042,728 | Apr. 08, 1997 |
| PCT/US98/06801 | Non-provisional of | 60/042,754 | Apr. 08, 1997 |
| PCT/US98/06801 | Non-provisional of | 60/042,825 | Apr. 08, 1997 |
| PCT/US98/06801 | Non-provisional of | 60/048,068 | May 30, 1997 |
| PCT/US98/06801 | Non-provisional of | 60/048,070 | May 30, 1997 |
| PCT/US98/06801 | Non-provisional of | 60/048,184 | May 30, 1997 |
| 10/100,683 | Continuation-in-part of | PCT/US98/06801 | Apr. 07, 1997 |
| PCT/US98/06801 | Non-provisional of | 60/042,726 | Apr. 08, 1997 |
| PCT/US98/06801 | Non-provisional of | 60/042,727 | Apr. 08, 1997 |
| PCT/US98/06801 | Non-provisional of | 60/042,728 | Apr. 08, 1997 |
| PCT/US98/06801 | Non-provisional of | 60/042,754 | Apr. 08, 1997 |
| PCT/US98/06801 | Non-provisional of | 60/042,825 | Apr. 08, 1997 |
| PCT/US98/06801 | Non-provisional of | 60/048,068 | May 30, 1997 |
| PCT/US98/06801 | Non-provisional of | 60/048,070 | May 30, 1997 |
| PCT/US98/06801 | Non-provisional of | 60/048,184 | May 30, 1997 |
| 10/100,683 | Continuation-in-part of | PCT/US98/10868 | May 28, 1998 |
| PCT/US98/10868 | Non-provisional of | 60/044,039 | May 30, 1997 |
| PCT/US98/10868 | Non-provisional of | 60/048,093 | May 30, 1997 |
| PCT/US98/10868 | Non-provisional of | 60/048,190 | May 30, 1997 |
| PCT/US98/10868 | Non-provisional of | 60/050,935 | May 30, 1997 |
| PCT/US98/10868 | Non-provisional of | 60/048,101 | May 30, 1997 |
| PCT/US98/10868 | Non-provisional of | 60/048,356 | May 30, 1997 |
| PCT/US98/10868 | Non-provisional of | 60/056,250 | Aug. 29, 1997 |
| PCT/US98/10868 | Non-provisional of | 60/056,296 | Aug. 29, 1997 |
| PCT/US98/10868 | Non-provisional of | 60/056,293 | Aug. 29, 1997 |
| 10/100,683 | Continuation-in-part of | PCT/US98/11422 | Jun. 04, 1998 |
| PCT/US98/11422 | Non-provisional of | 60/048,885 | Jun. 06, 1997 |
| PCT/US98/11422 | Non-provisional of | 60/049,375 | Jun. 06, 1997 |
| PCT/US98/11422 | Non-provisional of | 60/048,881 | Jun. 06, 1997 |
| PCT/US98/11422 | Non-provisional of | 60/048,880 | Jun. 06, 1997 |
| PCT/US98/11422 | Non-provisional of | 60/048,896 | Jun. 06, 1997 |
| PCT/US98/11422 | Non-provisional of | 60/049,020 | Jun. 06, 1997 |
| PCT/US98/11422 | Non-provisional of | 60/048,876 | Jun. 06, 1997 |
| PCT/US98/11422 | Non-provisional of | 60/048,895 | Jun. 06, 1997 |
| PCT/US98/11422 | Non-provisional of | 60/048,884 | Jun. 06, 1997 |
| PCT/US98/11422 | Non-provisional of | 60/048,894 | Jun. 06, 1997 |
| PCT/US98/11422 | Non-provisional of | 60/048,971 | Jun. 06, 1997 |
| PCT/US98/11422 | Non-provisional of | 60/048,964 | Jun. 06, 1997 |
| PCT/US98/11422 | Non-provisional of | 60/048,882 | Jun. 06, 1997 |
| PCT/US98/11422 | Non-provisional of | 60/048,899 | Jun. 06, 1997 |
| PCT/US98/11422 | Non-provisional of | 60/048,893 | Jun. 06, 1997 |
| PCT/US98/11422 | Non-provisional of | 60/048,900 | Jun. 06, 1997 |
| PCT/US98/11422 | Non-provisional of | 60/048,901 | Jun. 06, 1997 |
| PCT/US98/11422 | Non-provisional of | 60/048,892 | Jun. 06, 1997 |
| PCT/US98/11422 | Non-provisional of | 60/048,915 | Jun. 06, 1997 |
| PCT/US98/11422 | Non-provisional of | 60/049,019 | Jun. 06, 1997 |
| PCT/US98/11422 | Non-provisional of | 60/048,970 | Jun. 06, 1997 |
| PCT/US98/11422 | Non-provisional of | 60/048,972 | Jun. 06, 1997 |
| PCT/US98/11422 | Non-provisional of | 60/048,916 | Jun. 06, 1997 |
| PCT/US98/11422 | Non-provisional of | 60/049,373 | Jun. 06, 1997 |
| PCT/US98/11422 | Non-provisional of | 60/048,875 | Jun. 06, 1997 |
| PCT/US98/11422 | Non-provisional of | 60/049,374 | Jun. 06, 1997 |
| PCT/US98/11422 | Non-provisional of | 60/048,917 | Jun. 06, 1997 |
| PCT/US98/11422 | Non-provisional of | 60/048,949 | Jun. 06, 1997 |
| PCT/US98/11422 | Non-provisional of | 60/048,974 | Jun. 06, 1997 |
| PCT/US98/11422 | Non-provisional of | 60/048,883 | Jun. 06, 1997 |
| PCT/US98/11422 | Non-provisional of | 60/048,897 | Jun. 06, 1997 |
| PCT/US98/11422 | Non-provisional of | 60/048,898 | Jun. 06, 1997 |
| PCT/US98/11422 | Non-provisional of | 60/048,962 | Jun. 06, 1997 |
| PCT/US98/11422 | Non-provisional of | 60/048,963 | Jun. 06, 1997 |
| PCT/US98/11422 | Non-provisional of | 60/048,877 | Jun. 06, 1997 |
| PCT/US98/11422 | Non-provisional of | 60/048,878 | Jun. 06, 1997 |
| PCT/US98/11422 | Non-provisional of | 60/057,645 | Sep. 05, 1997 |
| PCT/US98/11422 | Non-provisional of | 60/057,642 | Sep. 05, 1997 |
| PCT/US98/11422 | Non-provisional of | 60/057,668 | Sep. 05, 1997 |
| PCT/US98/11422 | Non-provisional of | 60/057,635 | Sep. 05, 1997 |
| PCT/US98/11422 | Non-provisional of | 60/057,627 | Sep. 05, 1997 |
| PCT/US98/11422 | Non-provisional of | 60/057,667 | Sep. 05, 1997 |
| PCT/US98/11422 | Non-provisional of | 60/057,666 | Sep. 05, 1997 |
| PCT/US98/11422 | Non-provisional of | 60/057,764 | Sep. 05, 1997 |
| PCT/US98/11422 | Non-provisional of | 60/057,643 | Sep. 05, 1997 |
| PCT/US98/11422 | Non-provisional of | 60/057,769 | Sep. 05, 1997 |
| PCT/US98/11422 | Non-provisional of | 60/057,763 | Sep. 05, 1997 |
| PCT/US98/11422 | Non-provisional of | 60/057,650 | Sep. 05, 1997 |
| PCT/US98/11422 | Non-provisional of | 60/057,584 | Sep. 05, 1997 |
| PCT/US98/11422 | Non-provisional of | 60/057,647 | Sep. 05, 1997 |
| PCT/US98/11422 | Non-provisional of | 60/057,661 | Sep. 05, 1997 |
| PCT/US98/11422 | Non-provisional of | 60/057,662 | Sep. 05, 1997 |
| PCT/US98/11422 | Non-provisional of | 60/057,646 | Sep. 05, 1997 |
| PCT/US98/11422 | Non-provisional of | 60/057,654 | Sep. 05, 1997 |
| PCT/US98/11422 | Non-provisional of | 60/057,651 | Sep. 05, 1997 |
| PCT/US98/11422 | Non-provisional of | 60/057,644 | Sep. 05, 1997 |
| PCT/US98/11422 | Non-provisional of | 60/057,765 | Sep. 05, 1997 |
| PCT/US98/11422 | Non-provisional of | 60/057,762 | Sep. 05, 1997 |
| PCT/US98/11422 | Non-provisional of | 60/057,775 | Sep. 05, 1997 |
| PCT/US98/11422 | Non-provisional of | 60/057,648 | Sep. 05, 1997 |
| PCT/US98/11422 | Non-provisional of | 60/057,774 | Sep. 05, 1997 |
| PCT/US98/11422 | Non-provisional of | 60/057,649 | Sep. 05, 1997 |
| PCT/US98/11422 | Non-provisional of | 60/057,770 | Sep. 05, 1997 |
| PCT/US98/11422 | Non-provisional of | 60/057,771 | Sep. 05, 1997 |
| PCT/US98/11422 | Non-provisional of | 60/057,761 | Sep. 05, 1997 |
| PCT/US98/11422 | Non-provisional of | 60/057,760 | Sep. 05, 1997 |
| PCT/US98/11422 | Non-provisional of | 60/057,776 | Sep. 05, 1997 |
| PCT/US98/11422 | Non-provisional of | 60/057,778 | Sep. 05, 1997 |
| PCT/US98/11422 | Non-provisional of | 60/057,629 | Sep. 05, 1997 |
| PCT/US98/11422 | Non-provisional of | 60/057,628 | Sep. 05, 1997 |
| PCT/US98/11422 | Non-provisional of | 60/057,777 | Sep. 05, 1997 |
| PCT/US98/11422 | Non-provisional of | 60/057,634 | Sep. 05, 1997 |
| PCT/US98/11422 | Non-provisional of | 60/070,923 | Dec. 18, 1997 |
| 10/100,683 | Continuation-in-part of | PCT/US01/05614 | Feb. 21, 2001 |
| PCT/US01/05614 | Non-provisional of | 60/184,836 | Feb. 24, 2000 |
| PCT/US01/05614 | Non-provisional of | 60/193,170 | Mar. 29, 2000 |
| 10/100,683 | Continuation-in-part of | PCT/US98/12125 | Jun. 11, 1998 |
| PCT/US98/12125 | Non-provisional of | 60/049,547 | Jun. 13, 1997 |
| PCT/US98/12125 | Non-provisional of | 60/049,548 | Jun. 13, 1997 |
| PCT/US98/12125 | Non-provisional of | 60/049,549 | Jun. 13, 1997 |
| PCT/US98/12125 | Non-provisional of | 60/049,550 | Jun. 13, 1997 |
| PCT/US98/12125 | Non-provisional of | 60/049,566 | Jun. 13, 1997 |
| PCT/US98/12125 | Non-provisional of | 60/049,606 | Jun. 13, 1997 |
| PCT/US98/12125 | Non-provisional of | 60/049,607 | Jun. 13, 1997 |
| PCT/US98/12125 | Non-provisional of | 60/049,608 | Jun. 13, 1997 |
| PCT/US98/12125 | Non-provisional of | 60/049,609 | Jun. 13, 1997 |
| PCT/US98/12125 | Non-provisional of | 60/049,610 | Jun. 13, 1997 |
| PCT/US98/12125 | Non-provisional of | 60/049,611 | Jun. 13, 1997 |
| PCT/US98/12125 | Non-provisional of | 60/050,901 | Jun. 13, 1997 |
| PCT/US98/12125 | Non-provisional of | 60/052,989 | Jun. 13, 1997 |
| PCT/US98/12125 | Non-provisional of | 60/051,919 | Jul. 08, 1997 |
| PCT/US98/12125 | Non-provisional of | 60/055,984 | Aug. 18, 1997 |
| PCT/US98/12125 | Non-provisional of | 60/058,665 | Sep. 12, 1997 |
| PCT/US98/12125 | Non-provisional of | 60/058,668 | Sep. 12, 1997 |
| PCT/US98/12125 | Non-provisional of | 60/058,669 | Sep. 12, 1997 |
| PCT/US98/12125 | Non-provisional of | 60/058,750 | Sep. 12, 1997 |
| PCT/US98/12125 | Non-provisional of | 60/058,971 | Sep. 12, 1997 |
| PCT/US98/12125 | Non-provisional of | 60/058,972 | Sep. 12, 1997 |
| PCT/US98/12125 | Non-provisional of | 60/058,975 | Sep. 12, 1997 |
| PCT/US98/12125 | Non-provisional of | 60/060,834 | Oct. 02, 1997 |
| PCT/US98/12125 | Non-provisional of | 60/060,841 | Oct. 02, 1997 |
| PCT/US98/12125 | Non-provisional of | 60/060,844 | Oct. 02, 1997 |
| PCT/US98/12125 | Non-provisional of | 60/060,865 | Oct. 02, 1997 |
| PCT/US98/12125 | Non-provisional of | 60/061,059 | Oct. 02, 1997 |
| PCT/US98/12125 | Non-provisional of | 60/061,060 | Oct. 02, 1997 |
| 10/100,683 | Continuation-in-part of | 09/627,081 | Jul. 27, 2000 |
| 09/627,081 | Continuation of | 09/213,365 | Dec. 17, 1998 |
| 09/213,365 | Continuation-in-part of | PCT/US98/13608 | Jun. 30, 1998 |
| 10/100,683 | Continuation-in-part of | PCT/US98/13608 | Jun. 30, 1998 |
| PCT/US98/13608 | Non-provisional of | 60/051,480 | Jul. 01, 1997 |
| PCT/US98/13608 | Non-provisional of | 60/051,381 | Jul. 01, 1997 |
| PCT/US98/13608 | Non-provisional of | 60/058,663 | Sep. 12, 1997 |
| PCT/US98/13608 | Non-provisional of | 60/058,598 | Sep. 12, 1997 |
| 10/100,683 | Continuation-in-part of | 09/984,490 | Oct. 30, 2001 |
| 09/984,490 | Divisional of | 09/227,357 | Jan. 08, 1999 |
| 09/227,357 | Continuation-in-part of | PCT/US98/13684 | Jul. 07, 1998 |
| 10/100,683 | Continuation-in-part of | 09/983,802 | Oct. 25, 2001 |
| 09/983,802 | Continuation of | 09/227,357 | Oct. 10, 2001 |
| 09/227,357 | Continuation-in-part of | PCT/US98/13684 | Jul. 07, 1998 |
| 10/100,683 | Continuation-in-part of | 09/973,278 | Oct. 10, 2001 |
| 09/973,278 | Non-provisional of | 60/239,899 | Oct. 13, 2000 |
| 09/973,278 | Continuation-in-part of | 09/227,357 | Jan. 08, 1999 |
| 09/227,357 | Continuation-in-part of | PCT/US98/13684 | Jul. 07, 1998 |
| 10/100,683 | Continuation-in-part of | PCT/US98/13684 | Jul. 07, 1998 |
| PCT/US98/13684 | Non-provisional of | 60/051,926 | Jul. 08, 1997 |
| PCT/US98/13684 | Non-provisional of | 60/052,793 | Jul. 08, 1997 |
| PCT/US98/13684 | Non-provisional of | 60/051,925 | Jul. 08, 1997 |
| PCT/US98/13684 | Non-provisional of | 60/051,929 | Jul. 08, 1997 |
| PCT/US98/13684 | Non-provisional of | 60/052,803 | Jul. 08, 1997 |
| PCT/US98/13684 | Non-provisional of | 60/052,732 | Jul. 08, 1997 |
| PCT/US98/13684 | Non-provisional of | 60/051,931 | Jul. 08, 1997 |
| PCT/US98/13684 | Non-provisional of | 60/051,932 | Jul. 08, 1997 |
| PCT/US98/13684 | Non-provisional of | 60/051,916 | Jul. 08, 1997 |
| PCT/US98/13684 | Non-provisional of | 60/051,930 | Jul. 08, 1997 |
| PCT/US98/13684 | Non-provisional of | 60/051,918 | Jul. 08, 1997 |
| PCT/US98/13684 | Non-provisional of | 60/051,920 | Jul. 08, 1997 |
| PCT/US98/13684 | Non-provisional of | 60/052,733 | Jul. 08, 1997 |
| PCT/US98/13684 | Non-provisional of | 60/052,795 | Jul. 08, 1997 |
| PCT/US98/13684 | Non-provisional of | 60/051,919 | Jul. 08, 1997 |
| PCT/US98/13684 | Non-provisional of | 60/051,928 | Jul. 08, 1997 |
| PCT/US98/13684 | Non-provisional of | 60/055,722 | Aug. 18, 1997 |
| PCT/US98/13684 | Non-provisional of | 60/055,723 | Aug. 18, 1997 |
| PCT/US98/13684 | Non-provisional of | 60/055,948 | Aug. 18, 1997 |
| PCT/US98/13684 | Non-provisional of | 60/055,949 | Aug. 18, 1997 |
| PCT/US98/13684 | Non-provisional of | 60/055,953 | Aug. 18, 1997 |
| PCT/US98/13684 | Non-provisional of | 60/055,950 | Aug. 18, 1997 |
| PCT/US98/13684 | Non-provisional of | 60/055,947 | Aug. 18, 1997 |
| PCT/US98/13684 | Non-provisional of | 60/055,964 | Aug. 18, 1997 |
| PCT/US98/13684 | Non-provisional of | 60/056,360 | Aug. 18, 1997 |
| PCT/US98/13684 | Non-provisional of | 60/055,684 | Aug. 18, 1997 |
| PCT/US98/13684 | Non-provisional of | 60/055,984 | Aug. 18, 1997 |
| PCT/US98/13684 | Non-provisional of | 60/055,954 | Aug. 18, 1997 |
| PCT/US98/13684 | Non-provisional of | 60/058,785 | Sep. 12, 1997 |
| PCT/US98/13684 | Non-provisional of | 60/058,664 | Sep. 12, 1997 |
| PCT/US98/13684 | Non-provisional of | 60/058,660 | Sep. 12, 1997 |
| PCT/US98/13684 | Non-provisional of | 60/058,661 | Sep. 12, 1997 |
| 10/100,683 | Continuation-in-part of | 09/776,724 | Feb. 06, 2001 |
| 09/776,724 | Non-provisional of | 60/180,909 | Feb. 08, 2000 |
| 09/776,724 | Continuation-in-part of | 09/669,688 | Sep. 26, 2000 |
| 09/669,688 | Continuation of | 09/229,982 | Jan. 14, 1999 |
| 09/229,982 | Continuation-in-part of | PCT/US98/14613 | Jul. 15, 1998 |
| 10/100,683 | Continuation-in-part of | 09/669,688 | Sep. 26, 2000 |
| 09/669,688 | Continuation of | 09/229,982 | Jan. 14, 1999 |
| 09/229,982 | Continuation-in-part of | PCT/US98/14613 | Jul. 15, 1998 |
| 10/100,683 | Continuation-in-part of | 09/229,982 | Jan. 14, 1999 |
| 09/229,982 | Continuation-in-part of | PCT/US98/14613 | Jul. 15, 1998 |
| 10/100,683 | Continuation-in-part of | PCT/US98/14613 | Jul. 15, 1998 |
| PCT/US98/14613 | Non-provisional of | 60/052,661 | Jul. 16, 1997 |
| PCT/US98/14613 | Non-provisional of | 60/052,872 | Jul. 16, 1997 |
| PCT/US98/14613 | Non-provisional of | 60/052,871 | Jul. 16, 1997 |
| PCT/US98/14613 | Non-provisional of | 60/052,874 | Jul. 16, 1997 |
| PCT/US98/14613 | Non-provisional of | 60/052,873 | Jul. 16, 1997 |
| PCT/US98/14613 | Non-provisional of | 60/052,870 | Jul. 16, 1997 |
| PCT/US98/14613 | Non-provisional of | 60/052,875 | Jul. 16, 1997 |
| PCT/US98/14613 | Non-provisional of | 60/053,440 | Jul. 22, 1997 |
| PCT/US98/14613 | Non-provisional of | 60/053,441 | Jul. 22, 1997 |
| PCT/US98/14613 | Non-provisional of | 60/053,442 | Jul. 22, 1997 |
| PCT/US98/14613 | Non-provisional of | 60/056,359 | Aug. 18, 1997 |
| PCT/US98/14613 | Non-provisional of | 60/055,725 | Aug. 18, 1997 |
| PCT/US98/14613 | Non-provisional of | 60/055,985 | Aug. 18, 1997 |
| PCT/US98/14613 | Non-provisional of | 60/055,952 | Aug. 18, 1997 |
| PCT/US98/14613 | Non-provisional of | 60/055,989 | Aug. 18, 1997 |
| PCT/US98/14613 | Non-provisional of | 60/056,361 | Aug. 18, 1997 |
| PCT/US98/14613 | Non-provisional of | 60/055,726 | Aug. 18, 1997 |
| PCT/US98/14613 | Non-provisional of | 60/055,724 | Aug. 18, 1997 |
| PCT/US98/14613 | Non-provisional of | 60/055,946 | Aug. 18, 1997 |
| PCT/US98/14613 | Non-provisional of | 60/055,683 | Aug. 18, 1997 |
| 10/100,683 | Non-provisional of | 60/295,558 | Jun. 05, 2001 |
| 10/100,683 | Continuation-in-part of | 09/820,649 | Mar. 30, 2001 |
| 09/820,649 | Continuation of | 09/666,984 | Sep. 21, 2000 |
| 09/666,984 | Continuation of | 09/236,557 | Jan. 26, 1999 |
| 09/236,557 | Continuation-in-part of | PCT/US98/15949 | Jul. 29, 1998 |
| 10/100,683 | Continuation-in-part of | PCT/US98/15949 | Jul. 29, 1998 |
| PCT/US98/15949 | Non-provisional of | 60/054,212 | Jul. 30, 1997 |
| PCT/US98/15949 | Non-provisional of | 60/054,209 | Jul. 30, 1997 |
| PCT/US98/15949 | Non-provisional of | 60/054,234 | Jul. 30, 1997 |
| PCT/US98/15949 | Non-provisional of | 60/054,218 | Jul. 30, 1997 |
| PCT/US98/15949 | Non-provisional of | 60/054,214 | Jul. 30, 1997 |
| PCT/US98/15949 | Non-provisional of | 60/054,236 | Jul. 30, 1997 |
| PCT/US98/15949 | Non-provisional of | 60/054,215 | Jul. 30, 1997 |
| PCT/US98/15949 | Non-provisional of | 60/054,211 | Jul. 30, 1997 |
| PCT/US98/15949 | Non-provisional of | 60/054,217 | Jul. 30, 1997 |
| PCT/US98/15949 | Non-provisional of | 60/054,213 | Jul. 30, 1997 |
| PCT/US98/15949 | Non-provisional of | 60/055,968 | Aug. 18, 1997 |
| PCT/US98/15949 | Non-provisional of | 60/055,969 | Aug. 18, 1997 |
| PCT/US98/15949 | Non-provisional of | 60/055,972 | Aug. 18, 1997 |
| PCT/US98/15949 | Non-provisional of | 60/056,561 | Aug. 19, 1997 |
| PCT/US98/15949 | Non-provisional of | 60/056,534 | Aug. 19, 1997 |
| PCT/US98/15949 | Non-provisional of | 60/056,729 | Aug. 19, 1997 |
| PCT/US98/15949 | Non-provisional of | 60/056,543 | Aug. 19, 1997 |
| PCT/US98/15949 | Non-provisional of | 60/056,727 | Aug. 19, 1997 |
| PCT/US98/15949 | Non-provisional of | 60/056,554 | Aug. 19, 1997 |
| PCT/US98/15949 | Non-provisional of | 60/056,730 | Aug. 19, 1997 |
| 10/100,683 | Continuation-in-part of | 09/969,730 | Oct. 04, 2001 |
| 09/969,730 | Continuation-in-part of | 09/774,639 | Feb. 01, 2001 |
| 09/774,639 | Continuation of | 09/244,112 | Feb. 04, 1999 |
| 09/244,112 | Continuation-in-part of | PCT/US98/16235 | Aug. 04, 1998 |
| 10/100,683 | Continuation-in-part of | 09/774,639 | Feb. 01, 2001 |
| 09/774,639 | Continuation of | 09/244,112 | Feb. 04, 1999 |
| 09/244,112 | Continuation-in-part of | PCT/US98/16235 | Aug. 04, 1998 |
| 10/100,683 | Continuation-in-part of | 09/969,730 | Oct. 04, 2001 |
| 09/969,730 | Non-provisional of | 60/238,291 | Oct. 06, 2000 |
| 10/100,683 | Continuation-in-part of | PCT/US98/16235 | Aug. 04, 1998 |
| PCT/US98/16235 | Non-provisional of | 60/055,386 | Aug. 05, 1997 |
| PCT/US98/16235 | Non-provisional of | 60/054,807 | Aug. 05, 1997 |
| PCT/US98/16235 | Non-provisional of | 60/055,312 | Aug. 05, 1997 |
| PCT/US98/16235 | Non-provisional of | 60/055,309 | Aug. 05, 1997 |
| PCT/US98/16235 | Non-provisional of | 60/054,798 | Aug. 05, 1997 |
| PCT/US98/16235 | Non-provisional of | 60/055,310 | Aug. 05, 1997 |
| PCT/US98/16235 | Non-provisional of | 60/054,806 | Aug. 05, 1997 |
| PCT/US98/16235 | Non-provisional of | 60/054,809 | Aug. 05, 1997 |
| PCT/US98/16235 | Non-provisional of | 60/054,804 | Aug. 05, 1997 |
| PCT/US98/16235 | Non-provisional of | 60/054,803 | Aug. 05, 1997 |
| PCT/US98/16235 | Non-provisional of | 60/054,808 | Aug. 05, 1997 |
| PCT/US98/16235 | Non-provisional of | 60/055,311 | Aug. 05, 1997 |
| PCT/US98/16235 | Non-provisional of | 60/055,986 | Aug. 18, 1997 |
| PCT/US98/16235 | Non-provisional of | 60/055,970 | Aug. 18, 1997 |
| PCT/US98/16235 | Non-provisional of | 60/056,563 | Aug. 19, 1997 |
| PCT/US98/16235 | Non-provisional of | 60/056,557 | Aug. 19, 1997 |
| PCT/US98/16235 | Non-provisional of | 60/056,731 | Aug. 19, 1997 |
| PCT/US98/16235 | Non-provisional of | 60/056,365 | Aug. 19, 1997 |
| PCT/US98/16235 | Non-provisional of | 60/056,367 | Aug. 19, 1997 |
| PCT/US98/16235 | Non-provisional of | 60/056,370 | Aug. 19, 1997 |
| PCT/US98/16235 | Non-provisional of | 60/056,364 | Aug. 19, 1997 |
| PCT/US98/16235 | Non-provisional of | 60/056,366 | Aug. 19, 1997 |
| PCT/US98/16235 | Non-provisional of | 60/056,732 | Aug. 19, 1997 |
| PCT/US98/16235 | Non-provisional of | 60/056,371 | Aug. 19, 1997 |
| 10/100,683 | Continuation-in-part of | 09/716,128 | Nov. 17, 2000 |
| 09/716,128 | Continuation of | 09/251,329 | Feb. 17, 1999 |
| 09/251,329 | Continuation-in-part of | PCT/US98/17044 | Aug. 18, 1998 |
| 10/100,683 | Continuation-in-part of | PCT/US98/17044 | Aug. 18, 1998 |
| PCT/US98/17044 | Non-provisional of | 60/056,555 | Aug. 19, 1997 |
| PCT/US98/17044 | Non-provisional of | 60/056,556 | Aug. 19, 1997 |
| PCT/US98/17044 | Non-provisional of | 60/056,535 | Aug. 19, 1997 |
| PCT/US98/17044 | Non-provisional of | 60/056,629 | Aug. 19, 1997 |
| PCT/US98/17044 | Non-provisional of | 60/056,369 | Aug. 19, 1997 |
| PCT/US98/17044 | Non-provisional of | 60/056,628 | Aug. 19, 1997 |
| PCT/US98/17044 | Non-provisional of | 60/056,728 | Aug. 19, 1997 |
| PCT/US98/17044 | Non-provisional of | 60/056,368 | Aug. 19, 1997 |
| PCT/US98/17044 | Non-provisional of | 60/056,726 | Aug. 19, 1997 |
| PCT/US98/17044 | Non-provisional of | 60/089,510 | Jun. 16, 1998 |
| PCT/US98/17044 | Non-provisional of | 60/092,956 | Jul. 15, 1998 |
| 10/100,683 | Continuation-in-part of | 09/729,835 | Dec. 06, 2000 |
| 09/729,835 | Divisional of | 09/257,179 | Feb. 25, 1999 |
| 09/257,179 | Continuation-in-part of | PCT/US98/17709 | Aug. 27, 1998 |
| 10/100,683 | Continuation-in-part of | 09/257,179 | Feb. 25, 1999 |
| 09/257,179 | Continuation-in-part of | PCT/US98/17709 | Aug. 27, 1998 |
| 10/100,683 | Continuation-in-part of | PCT/US98/17709 | Aug. 27, 1998 |
| PCT/US98/17709 | Non-provisional of | 60/056,270 | Aug. 29, 1997 |
| PCT/US98/17709 | Non-provisional of | 60/056,271 | Aug. 29, 1997 |
| PCT/US98/17709 | Non-provisional of | 60/056,247 | Aug. 29, 1997 |
| PCT/US98/17709 | Non-provisional of | 60/056,073 | Aug. 29, 1997 |
| 10/100,683 | Continuation-in-part of | 10/047,021 | Jan. 17, 2002 |
| 10/047,021 | Continuation-in-part of | 09/722,329 | Nov. 28, 2000 |
| 09/722,329 | Continuation of | 09/262,109 | Mar. 04, 1999 |
| 09/262,109 | Continuation-in-part of | PCT/US98/18360 | Sep. 03, 1998 |
| 10/100,683 | Continuation-in-part of | 09/722,329 | Nov. 28, 2000 |
| 09/722,329 | Continuation of | 09/262,109 | Mar. 04, 1999 |
| 09/262,109 | Continuation-in-part of | PCT/US98/18360 | Sep. 03, 1998 |
| 10/100,683 | Continuation-in-part of | PZ016pct2 | Jan. 17, 2002 |
| PZ016pct2 | Non-provisional of | 60/262,066 | Jan. 18, 2001 |
| 10/100,683 | Continuation-in-part of | PCT/US98/18360 | Sep. 03, 1998 |
| PCT/US98/18360 | Non-provisional of | 60/057,626 | Sep. 05, 1997 |
| PCT/US98/18360 | Non-provisional of | 60/057,663 | Sep. 05, 1997 |
| PCT/US98/18360 | Non-provisional of | 60/057,669 | Sep. 05, 1997 |
| PCT/US98/18360 | Non-provisional of | 60/058,667 | Sep. 12, 1997 |
| PCT/US98/18360 | Non-provisional of | 60/058,974 | Sep. 12, 1997 |
| PCT/US98/18360 | Non-provisional of | 60/058,973 | Sep. 12, 1997 |
| PCT/US98/18360 | Non-provisional of | 60/058,666 | Sep. 12, 1997 |
| PCT/US98/18360 | Non-provisional of | 60/090,112 | Jun. 22, 1998 |
| 10/100,683 | Continuation-in-part of | 09/281,976 | Mar. 31, 1999 |
| 09/281,976 | Continuation-in-part of | PCT/US98/20775 | Oct. 01, 1998 |
| 10/100,683 | Continuation-in-part of | PCT/US98/20775 | Oct. 01, 1998 |
| PCT/US98/20775 | Non-provisional of | 60/060,837 | Oct. 02, 1997 |
| PCT/US98/20775 | Non-provisional of | 60/060,862 | Oct. 02, 1997 |
| PCT/US98/20775 | Non-provisional of | 60/060,839 | Oct. 02, 1997 |
| PCT/US98/20775 | Non-provisional of | 60/060,866 | Oct. 02, 1997 |
| PCT/US98/20775 | Non-provisional of | 60/060,843 | Oct. 02, 1997 |
| PCT/US98/20775 | Non-provisional of | 60/060,836 | Oct. 02, 1997 |
| PCT/US98/20775 | Non-provisional of | 60/060,838 | Oct. 02, 1997 |
| PCT/US98/20775 | Non-provisional of | 60/060,874 | Oct. 02, 1997 |
| PCT/US98/20775 | Non-provisional of | 60/060,833 | Oct. 02, 1997 |
| PCT/US98/20775 | Non-provisional of | 60/060,884 | Oct. 02, 1997 |
| PCT/US98/20775 | Non-provisional of | 60/060,880 | Oct. 02, 1997 |
| 10/100,683 | Continuation-in-part of | 09/984,429 | Oct. 30, 2001 |
| 09/984,429 | Non-provisional of | 60/244,591 | Nov. 01, 2000 |
| 09/984,429 | Continuation-in-part of | 09/288,143 | Apr. 08, 1999 |
| 09/288,143 | Continuation-in-part of | PCT/US98/21142 | Oct. 08, 1998 |
| 10/100,683 | Non-provisional of | 60/244,591 | Nov. 01, 2000 |
| 10/100,683 | Continuation-in-part of | 09/288,143 | Apr. 08, 1999 |
| 09/288,143 | Continuation-in-part of | PCT/US98/21142 | Oct. 08, 1998 |
| 10/100,683 | Continuation-in-part of | PCT/US98/21142 | Oct. 08, 1998 |
| PCT/US98/21142 | Non-provisional of | 60/061,463 | Oct. 09, 1997 |
| PCT/US98/21142 | Non-provisional of | 60/061,529 | Oct. 09, 1997 |
| PCT/US98/21142 | Non-provisional of | 60/071,498 | Oct. 09, 1997 |
| PCT/US98/21142 | Non-provisional of | 60/061,527 | Oct. 09, 1997 |
| PCT/US98/21142 | Non-provisional of | 60/061,536 | Oct. 09, 1997 |
| PCT/US98/21142 | Non-provisional of | 60/061,532 | Oct. 09, 1997 |
| 10/100,683 | Continuation-in-part of | 09/296,622 | Apr. 23, 1999 |
| 09/296,622 | Continuation-in-part of | PCT/US98/22376 | Oct. 23, 1998 |
| 10/100,683 | Continuation-in-part of | PCT/US98/22376 | Oct. 23, 1998 |
| PCT/US98/22376 | Non-provisional of | 60/063,099 | Oct. 24, 1997 |
| PCT/US98/22376 | Non-provisional of | 60/063,088 | Oct. 24, 1997 |
| PCT/US98/22376 | Non-provisional of | 60/063,100 | Oct. 24, 1997 |
| PCT/US98/22376 | Non-provisional of | 60/063,387 | Oct. 24, 1997 |
| PCT/US98/22376 | Non-provisional of | 60/063,148 | Oct. 24, 1997 |
| PCT/US98/22376 | Non-provisional of | 60/063,386 | Oct. 24, 1997 |
| PCT/US98/22376 | Non-provisional of | 60/062,784 | Oct. 24, 1997 |
| PCT/US98/22376 | Non-provisional of | 60/063,091 | Oct. 24, 1997 |
| PCT/US98/22376 | Non-provisional of | 60/063,090 | Oct. 24, 1997 |
| PCT/US98/22376 | Non-provisional of | 60/063,089 | Oct. 24, 1997 |
| PCT/US98/22376 | Non-provisional of | 60/063,092 | Oct. 24, 1997 |
| PCT/US98/22376 | Non-provisional of | 60/063,111 | Oct. 24, 1997 |
| PCT/US98/22376 | Non-provisional of | 60/063,101 | Oct. 24, 1997 |
| PCT/US98/22376 | Non-provisional of | 60/063,109 | Oct. 24, 1997 |
| PCT/US98/22376 | Non-provisional of | 60/063,110 | Oct. 24, 1997 |
| PCT/US98/22376 | Non-provisional of | 60/063,098 | Oct. 24, 1997 |
| PCT/US98/22376 | Non-provisional of | 60/063,097 | Oct. 24, 1997 |
| 10/100,683 | Continuation-in-part of | 09/974,879 | Oct. 12, 2001 |
| 09/974,879 | Non-provisional of | 60/239,893 | Oct. 13, 2000 |
| 09/974,879 | Continuation-in-part of | 09/818,683 | Mar. 28, 2001 |
| 09/818,683 | Continuation of | 09/305,736 | May 05, 1999 |
| 09/305,736 | Continuation-in-part of | PCT/US98/23435 | Nov. 04, 1998 |
| 10/100,683 | Continuation-in-part of | 09/818,683 | Mar. 28, 2001 |
| 09/818,683 | Continuation of | 09/305,736 | May 05, 1999 |
| 09/305,736 | Continuation-in-part of | PCT/US98/23435 | Nov. 04, 1998 |
| 10/100,683 | Continuation-in-part of | 09/305,736 | May 05, 1999 |
| 09/305,736 | Continuation-in-part of | PCT/US98/23435 | Nov. 04, 1998 |
| 10/100,683 | Continuation-in-part of | PCT/US98/23435 | Nov. 04, 1998 |
| PCT/US98/23435 | Non-provisional of | 60/064,911 | Nov. 07, 1997 |
| PCT/US98/23435 | Non-provisional of | 60/064,912 | Nov. 07, 1997 |
| PCT/US98/23435 | Non-provisional of | 60/064,983 | Nov. 07, 1997 |
| PCT/US98/23435 | Non-provisional of | 60/064,900 | Nov. 07, 1997 |
| PCT/US98/23435 | Non-provisional of | 60/064,988 | Nov. 07, 1997 |
| PCT/US98/23435 | Non-provisional of | 60/064,987 | Nov. 07, 1997 |
| PCT/US98/23435 | Non-provisional of | 60/064,908 | Nov. 07, 1997 |
| PCT/US98/23435 | Non-provisional of | 60/064,984 | Nov. 07, 1997 |
| PCT/US98/23435 | Non-provisional of | 60/064,985 | Nov. 07, 1997 |
| PCT/US98/23435 | Non-provisional of | 60/066,094 | Nov. 17, 1997 |
| PCT/US98/23435 | Non-provisional of | 60/066,100 | Nov. 17, 1997 |
| PCT/US98/23435 | Non-provisional of | 60/066,089 | Nov. 17, 1997 |
| PCT/US98/23435 | Non-provisional of | 60/066,095 | Nov. 17, 1997 |
| PCT/US98/23435 | Non-provisional of | 60/066,090 | Nov. 17, 1997 |
| 10/100,683 | Continuation-in-part of | 09/334,595 | Jun. 17, 1999 |
| 09/334,595 | Continuation-in-part of | PCT/US98/27059 | Dec. 17, 1998 |
| 10/100,683 | Continuation-in-part of | PCT/US98/27059 | Dec. 17, 1998 |
| PCT/US98/27059 | Non-provisional of | 60/070,923 | Dec. 18, 1997 |
| PCT/US98/27059 | Non-provisional of | 60/068,007 | Dec. 18, 1997 |
| PCT/US98/27059 | Non-provisional of | 60/068,057 | Dec. 18, 1997 |
| PCT/US98/27059 | Non-provisional of | 60/068,006 | Dec. 18, 1997 |
| PCT/US98/27059 | Non-provisional of | 60/068,369 | Dec. 19, 1997 |
| PCT/US98/27059 | Non-provisional of | 60/068,367 | Dec. 19, 1997 |
| PCT/US98/27059 | Non-provisional of | 60/068,368 | Dec. 19, 1997 |
| PCT/US98/27059 | Non-provisional of | 60/068,169 | Dec. 19, 1997 |
| PCT/US98/27059 | Non-provisional of | 60/068,053 | Dec. 18, 1997 |
| PCT/US98/27059 | Non-provisional of | 60/068,064 | Dec. 18, 1997 |
| PCT/US98/27059 | Non-provisional of | 60/068,054 | Dec. 18, 1997 |
| PCT/US98/27059 | Non-provisional of | 60/068,008 | Dec. 18, 1997 |
| PCT/US98/27059 | Non-provisional of | 60/068,365 | Dec. 19, 1997 |
| 10/100,683 | Continuation-in-part of | 09/938,671 | Aug. 27, 2001 |
| 09/938,671 | Continuation of | 09/739,907 | Dec. 20, 2000 |
| 09/739,907 | Continuation of | 09/348,457 | Jul. 07, 1999 |
| 09/348,457 | Continuation-in-part of | PCT/US99/00108 | Jan. 06, 1999 |
| 10/100,683 | Continuation-in-part of | 09/739,907 | Dec. 20, 2000 |
| 09/739,907 | Continuation of | 09/348,457 | Jul. 07, 1999 |
| 09/348,457 | Continuation-in-part of | PCT/US99/00108 | Jan. 06, 1999 |
| 10/100,683 | Continuation-in-part of | 09/348,457 | Jul. 07, 1999 |
| 09/348,457 | Continuation-in-part of | PCT/US99/00108 | Jan. 06, 1999 |
| 10/100,683 | Continuation-in-part of | PCT/US99/00108 | Jan. 06, 1999 |
| PCT/US99/00108 | Non-provisional of | 60/070,704 | Jan. 07, 1998 |
| PCT/US99/00108 | Non-provisional of | 60/070,658 | Jan. 07, 1998 |
| PCT/US99/00108 | Non-provisional of | 60/070,692 | Jan. 07, 1998 |
| PCT/US99/00108 | Non-provisional of | 60/070,657 | Jan. 07, 1998 |
| 10/100,683 | Continuation-in-part of | 09/949,925 | Sep. 12, 2001 |
| 09/949,925 | Non-provisional of | 60/232,150 | Sep. 12, 2000 |
| 09/949,925 | Continuation-in-part of | PCT/US99/01621 | Jan. 27, 1999 |
| 09/949,925 | Continuation-in-part of | 09/363,044 | Jul. 29, 1999 |
| 09/363,044 | Continuation-in-part of | PCT/US99/01621 | Jan. 27, 1999 |
| 10/100,683 | Continuation-in-part of | 09/813,153 | Mar. 21, 2001 |
| 09/813,153 | Continuation of | 09/363,044 | Jul. 29, 1999 |
| 09/363,044 | Continuation-in-part of | PCT/US99/01621 | Jan. 27, 1999 |
| 10/100,683 | Continuation-in-part of | 09/363,044 | Jul. 29, 1999 |
| 09/363,044 | Continuation-in-part of | PCT/US99/01621 | Jan. 27, 1999 |
| 10/100,683 | Continuation-in-part of | PCT/US99/01621 | Jan. 27, 1999 |
| PCT/US99/01621 | Non-provisional of | 60/073,170 | Jan. 30, 1998 |
| PCT/US99/01621 | Non-provisional of | 60/073,167 | Jan. 30, 1998 |
| PCT/US99/01621 | Non-provisional of | 60/073,165 | Jan. 30, 1998 |
| PCT/US99/01621 | Non-provisional of | 60/073,164 | Jan. 30, 1998 |
| PCT/US99/01621 | Non-provisional of | 60/073,162 | Jan. 30, 1998 |
| PCT/US99/01621 | Non-provisional of | 60/073,161 | Jan. 30, 1998 |
| PCT/US99/01621 | Non-provisional of | 60/073,160 | Jan. 30, 1998 |
| PCT/US99/01621 | Non-provisional of | 60/073,159 | Jan. 30, 1998 |
| 10/100,683 | Continuation-in-part of | 10/062,548 | Feb. 05, 2002 |
| 10/062,548 | Continuation of | 09/369,247 | Aug. 05, 1999 |
| 09/369,247 | Continuation-in-part of | PCT/US99/02293 | Feb. 04, 1999 |
| 10/100,683 | Continuation-in-part of | 09/369,247 | Aug. 05, 1999 |
| 09/369,247 | Continuation-in-part of | PCT/US99/02293 | Feb. 04, 1999 |
| 10/100,683 | Continuation-in-part of | PCT/US99/02293 | Feb. 04, 1999 |
| PCT/US99/02293 | Non-provisional of | 60/074,118 | Feb. 09, 1998 |
| PCT/US99/02293 | Non-provisional of | 60/074,157 | Feb. 09, 1998 |
| PCT/US99/02293 | Non-provisional of | 60/074,037 | Feb. 09, 1998 |
| PCT/US99/02293 | Non-provisional of | 60/074,141 | Feb. 09, 1998 |
| PCT/US99/02293 | Non-provisional of | 60/074,341 | Feb. 09, 1998 |
| 10/100,683 | Continuation-in-part of | 09/716,129 | Nov. 17, 2000 |
| 09/716,129 | Continuation-in-part of | PCT/US99/03939 | Feb. 24, 1999 |
| 09/716,129 | CON | 09/382,572 | Aug. 25, 1999 |
| 09/382,572 | Continuation-in-part of | PCT/US99/03939 | Feb. 24, 1999 |
| 10/100,683 | Continuation-in-part of | PCT/US99/03939 | Feb. 24, 1999 |
| PCT/US99/03939 | Non-provisional of | 60/076,053 | Feb. 26, 1998 |
| PCT/US99/03939 | Non-provisional of | 60/076,051 | Feb. 26, 1998 |
| PCT/US99/03939 | Non-provisional of | 60/076,054 | Feb. 26, 1998 |
| PCT/US99/03939 | Non-provisional of | 60/076,052 | Feb. 26, 1998 |
| PCT/US99/03939 | Non-provisional of | 60/076,057 | Feb. 26, 1998 |
| 10/100,683 | Continuation-in-part of | 09/798,889 | Mar. 06, 2001 |
| 09/798,889 | CON | 09/393,022 | Sep. 09, 1999 |
| 09/393,022 | Continuation-in-part of | PCT/US99/05721 | Mar. 11, 1999 |
| 10/100,683 | Continuation-in-part of | PCT/US99/05721 | Mar. 11, 1999 |
| PCT/US99/05721 | Non-provisional of | 60/077,714 | Mar. 12, 1998 |
| PCT/US99/05721 | Non-provisional of | 60/077,686 | Mar. 12, 1998 |
| PCT/US99/05721 | Non-provisional of | 60/077,687 | Mar. 12, 1998 |
| PCT/US99/05721 | Non-provisional of | 60/077,696 | Mar. 12, 1998 |
| 10/100,683 | Continuation-in-part of | 09/397,945 | Sep. 17, 1999 |
| 09/397,945 | Continuation-in-part of | PCT/US99/05804 | Mar. 18, 1999 |
| 10/100,683 | Continuation-in-part of | PCT/US99/05804 | Mar. 18, 1999 |
| PCT/US99/05804 | Non-provisional of | 60/078,566 | Mar. 19, 1998 |
| PCT/US99/05804 | Non-provisional of | 60/078,576 | Mar. 19, 1998 |
| PCT/US99/05804 | Non-provisional of | 60/078,573 | Mar. 19, 1998 |
| PCT/US99/05804 | Non-provisional of | 60/078,574 | Mar. 19, 1998 |
| PCT/US99/05804 | Non-provisional of | 60/078,579 | Mar. 19, 1998 |
| PCT/US99/05804 | Non-provisional of | 60/080,314 | Apr. 01, 1998 |
| PCT/US99/05804 | Non-provisional of | 60/080,312 | Apr. 01, 1998 |
| PCT/US99/05804 | Non-provisional of | 60/078,578 | Mar. 19, 1998 |
| PCT/US99/05804 | Non-provisional of | 60/078,581 | Mar. 19, 1998 |
| PCT/US99/05804 | Non-provisional of | 60/078,577 | Mar. 19, 1998 |
| PCT/US99/05804 | Non-provisional of | 60/078,563 | Mar. 19, 1998 |
| PCT/US99/05804 | Non-provisional of | 60/080,313 | Apr. 01, 1998 |
| 10/100,683 | Continuation-in-part of | 09/948,783 | Sep. 10, 2001 |
| 09/948,783 | Non-provisional of | 60/231,846 | Sep. 11, 2000 |
| 09/948,783 | Continuation-in-part of | 09/892,877 | Jun. 28, 2001 |
| 09/892,877 | Continuation of | 09/437,658 | Nov. 10, 1999 |
| 09/437,658 | Continuation-in-part of | PCT/US99/09847 | May 06, 1999 |
| 10/100,683 | Continuation-in-part of | 09/892,877 | Jun. 28, 2001 |
| 09/892,877 | Continuation of | 09/437,658 | Nov. 10, 1999 |
| 09/437,658 | Continuation-in-part of | PCT/US99/09847 | May 06, 1999 |
| 10/100,683 | Continuation-in-part of | PCT/US99/09847 | May 06, 1999 |
| PCT/US99/09847 | Non-provisional of | 60/085,093 | May 12, 1998 |
| PCT/US99/09847 | Non-provisional of | 60/085,094 | May 12, 1998 |
| PCT/US99/09847 | Non-provisional of | 60/085,105 | May 12, 1998 |
| PCT/US99/09847 | Non-provisional of | 60/085,180 | May 12, 1998 |
| PCT/US99/09847 | Non-provisional of | 60/085,927 | May 18, 1998 |
| PCT/US99/09847 | Non-provisional of | 60/085,906 | May 18, 1998 |
| PCT/US99/09847 | Non-provisional of | 60/085,920 | May 18, 1998 |
| PCT/US99/09847 | Non-provisional of | 60/085,924 | May 18, 1998 |
| PCT/US99/09847 | Non-provisional of | 60/085,922 | May 18, 1998 |
| PCT/US99/09847 | Non-provisional of | 60/085,923 | May 18, 1998 |
| PCT/US99/09847 | Non-provisional of | 60/085,921 | May 18, 1998 |
| PCT/US99/09847 | Non-provisional of | 60/085,925 | May 18, 1998 |
| PCT/US99/09847 | Non-provisional of | 60/085,928 | May 18, 1998 |
| 10/100,683 | Continuation-in-part of | 10/050,873 | Jan. 18, 2002 |
| 10/050,873 | Non-provisional of | 60/263,681 | Jan. 24, 2001 |
| 10/050,873 | Non-provisional of | 60/263,230 | Jan. 23, 2001 |
| 10/050,873 | Continuation-in-part of | 09/461,325 | Dec. 14, 1999 |
| 09/461,325 | Continuation-in-part of | PCT/US99/13418 | Jun. 15, 1999 |
| 10/100,683 | Continuation-in-part of | 10/012,542 | Dec. 12, 2001 |
| 10/012,542 | Divisional of | 09/461,325 | Dec. 14, 1999 |
| 09/461,325 | Continuation-in-part of | PCT/US99/13418 | Jun. 15, 1999 |
| 10/100,683 | Continuation-in-part of | 09/461,325 | Dec. 14, 1999 |
| 09/461,325 | Continuation-in-part of | PCT/US99/13418 | Jun. 15, 1999 |
| 10/100,683 | Continuation-in-part of | PCT/US99/13418 | Jun. 15, 1999 |
| PCT/US99/13418 | Non-provisional of | 60/089,507 | Jun. 16, 1998 |
| PCT/US99/13418 | Non-provisional of | 60/089,508 | Jun. 16, 1998 |
| PCT/US99/13418 | Non-provisional of | 60/089,509 | Jun. 16, 1998 |
| PCT/US99/13418 | Non-provisional of | 60/089,510 | Jun. 16, 1998 |
| PCT/US99/13418 | Non-provisional of | 60/090,112 | Jun. 22, 1998 |
| PCT/US99/13418 | Non-provisional of | 60/090,113 | Jun. 22, 1998 |
| 10/100,683 | Continuation-in-part of | 09/984,271 | Oct. 29, 2001 |
| 09/984,271 | Divisional of | 09/482,273 | Jan. 13, 2000 |
| 09/482,273 | Continuation-in-part of | PCT/US99/15849 | Jul. 14, 1999 |
| 10/100,683 | Continuation-in-part of | 09/984,276 | Oct. 29, 2001 |
| 09/984,276 | Divisional of | 09/482,273 | Jan. 13, 2000 |
| 09/482,273 | Continuation-in-part of | PCT/US99/15849 | Jul. 14, 1999 |
| 10/100,683 | Continuation-in-part of | 09/482,273 | Jan. 13, 2000 |
| 09/482,273 | Continuation-in-part of | PCT/US99/15849 | Jul. 14, 1999 |
| 10/100,683 | Continuation-in-part of | PCT/US99/15849 | Jul. 14, 1999 |
| PCT/US99/15849 | Non-provisional of | 60/092,921 | Jul. 15, 1998 |
| PCT/US99/15849 | Non-provisional of | 60/092,922 | Jul. 15, 1998 |
| PCT/US99/15849 | Non-provisional of | 60/092,956 | Jul. 15, 1998 |
| 10/100,683 | Continuation-in-part of | PCT/US01/29871 | Sep. 24, 2001 |
| PCT/US01/29871 | Non-provisional of | 60/234,925 | Sep. 25, 2000 |
| PCT/US01/29871 | Continuation-in-part of | PCT/US01/00911 | Jan. 12, 2001 |
| 10/100,683 | Continuation-in-part of | PCT/US01/00911 | Jan. 12, 2001 |
| PCT/US01/00911 | Continuation-in-part of | 09/482,273 | Jan. 13, 2000 |
| 10/100,683 | Non-provisional of | 60/350,898 | Jan. 25, 2002 |
| 10/100,683 | Continuation-in-part of | 09/489,847 | Jan. 24, 2000 |
| 09/489,847 | Continuation-in-part of | PCT/US99/17130 | Jul. 29, 1999 |
| 10/100,683 | Continuation-in-part of | PCT/US99/17130 | Jul. 29, 1999 |
| PCT/US99/17130 | Non-provisional of | 60/094,657 | Jul. 30, 1998 |
| PCT/US99/17130 | Non-provisional of | 60/095,486 | Aug. 05, 1998 |
| PCT/US99/17130 | Non-provisional of | 60/096,319 | Aug. 12, 1998 |
| PCT/US99/17130 | Non-provisional of | 60/095,454 | Aug. 06, 1998 |
| PCT/US99/17130 | Non-provisional of | 60/095,455 | Aug. 06, 1998 |
| 10/100,683 | Continuation-in-part of | 10/054,988 | Jan. 25, 2002 |
| 10/054,988 | Continuation of | 09/904,615 | Jul. 16, 2001 |
| 09/904,615 | Continuation of | 09/739,254 | Dec. 19, 2000 |
| 09/739,254 | Continuation of | 09/511,554 | Feb. 23, 2000 |
| 09/511,554 | Continuation-in-part of | PCT/US99/19330 | Aug. 24, 1999 |
| 10/100,683 | Continuation-in-part of | 09/904,615 | Jul. 16, 2001 |
| 09/904,615 | Continuation of | 09/739,254 | Dec. 19, 2000 |
| 09/739,254 | Continuation of | 09/511,554 | Feb. 23, 2000 |
| 09/511,554 | Continuation-in-part of | PCT/US99/19330 | Aug. 24, 1999 |
| 10/100,683 | Continuation-in-part of | PCT/US99/19330 | Aug. 24, 1999 |
| PCT/US99/19330 | Non-provisional of | 60/097,917 | Aug. 25, 1998 |
| PCT/US99/19330 | Non-provisional of | 60/098,634 | Aug. 31, 1998 |
| 10/100,683 | Continuation-in-part of | 09/820,893 | Mar. 30, 2001 |
| 09/820,893 | Continuation of | 09/531,119 | Mar. 20, 2000 |
| 09/531,119 | Continuation-in-part of | PCT/US99/22012 | Sep. 22, 1999 |
| 10/100,683 | Continuation-in-part of | PCT/US99/22012 | Sep. 22, 1999 |
| PCT/US99/22012 | Non-provisional of | 60/101,546 | Sep. 23, 1998 |
| PCT/US99/22012 | Non-provisional of | 60/102,895 | Oct. 02, 1998 |
| 10/100,683 | Continuation-in-part of | 09/948,820 | Sep. 10, 2001 |
| 09/948,820 | Continuation of | 09/565,391 | May 05, 2000 |
| 09/565,391 | Continuation-in-part of | PCT/US99/26409 | Nov. 09, 1999 |
| 10/100,683 | Continuation-in-part of | 09/565,391 | May 05, 2000 |
| 09/565,391 | Continuation-in-part of | PCT/US99/26409 | Nov. 09, 1999 |
| 10/100,683 | Continuation-in-part of | PCT/US99/26409 | Nov. 09, 1999 |
| PCT/US99/26409 | Non-provisional of | 60/108,207 | Nov. 12, 1998 |
| 10/100,683 | Continuation-in-part of | 09/895,298 | Jul. 02, 2001 |
| 09/895,298 | Continuation of | 09/591,316 | Jun. 09, 2000 |
| 09/591,316 | Continuation-in-part of | PCT/US99/29950 | Dec. 16, 1999 |
| 10/100,683 | Continuation-in-part of | PCT/US99/29950 | Dec. 16, 1999 |
| PCT/US99/29950 | Non-provisional of | 60/113,006 | Dec. 18, 1998 |
| PCT/US99/29950 | Non-provisional of | 60/112,809 | Dec. 17, 1998 |
| 10/100,683 | Continuation-in-part of | 09/985,153 | Nov. 01, 2001 |
| 09/985,153 | Continuation of | 09/618,150 | Jul. 17, 2000 |
| 09/618,150 | Continuation-in-part of | PCT/US00/00903 | Jan. 18, 2000 |
| 10/100,683 | Continuation-in-part of | PCT/US00/00903 | Jan. 18, 2000 |
| PCT/US00/00903 | Non-provisional of | 60/116,330 | Jan. 19, 1999 |
| 10/100,683 | Continuation-in-part of | 09/997,131 | Nov. 30, 2001 |
| 09/997,131 | Continuation of | 09/628,508 | Jul. 28, 2000 |
| 09/628,508 | Continuation-in-part of | PCT/US00/03062 | Feb. 08, 2000 |
| 10/100,683 | Continuation-in-part of | PCT/US00/03062 | Feb. 08, 2000 |
| PCT/US00/03062 | Non-provisional of | 60/119,468 | Feb. 10, 1999 |
| 10/100,683 | Continuation-in-part of | 10/050,882 | Jan. 18, 2002 |
| 10/050,882 | Continuation of | 09/661,453 | Sep. 13, 2000 |
| 09/661,453 | Continuation-in-part of | PCT/US00/06783 | Mar. 16, 2000 |
| 10/100,683 | Continuation-in-part of | 09/661,453 | Sep. 13, 2000 |
| 09/661,453 | Continuation-in-part of | PCT/US00/06783 | Mar. 16, 2000 |
| 10/100,683 | Continuation-in-part of | PCT/US00/06783 | Mar. 16, 2000 |
| PCT/US00/06783 | Non-provisional of | 60/125,055 | Mar. 18, 1999 |
| 10/100,683 | Continuation-in-part of | 10/050,704 | Jan. 18, 2002 |
| 10/050,704 | Continuation of | 09/684,524 | Oct. 10, 2000 |
| 09/684,524 | Continuation-in-part of | PCT/US00/08979 | Apr. 06, 2000 |
| 10/100,683 | Continuation-in-part of | 09/684,524 | Oct. 10, 2000 |
| 09/684,524 | Continuation-in-part of | PCT/US00/08979 | Apr. 06, 2000 |
| 10/100,683 | Continuation-in-part of | PCT/US00/08979 | Apr. 06, 2000 |
| PCT/US00/08979 | Non-provisional of | 60/128,693 | Apr. 09, 1999 |
| PCT/US00/08979 | Non-provisional of | 60/130,991 | Apr. 26, 1999 |
| 10/100,683 | Continuation-in-part of | 10/042,141 | Jan. 11, 2002 |
| 10/042,141 | Continuation of | 09/726,643 | Dec. 01, 2000 |
| 09/726,643 | Continuation-in-part of | PCT/US00/15187 | Jun. 02, 2000 |
| 10/100,683 | Continuation-in-part of | 09/726,643 | Dec. 01, 2000 |
| 09/726,643 | Continuation-in-part of | PCT/US00/15187 | Jun. 02, 2000 |
| 10/100,683 | Continuation-in-part of | PCT/US00/15187 | Jun. 02, 2000 |
| PCT/US00/15187 | Non-provisional of | 60/137,725 | Jun. 07, 1999 |
| 10/100,683 | Continuation-in-part of | 09/756,168 | Jan. 09, 2001 |
| 09/756,168 | Continuation-in-part of | PCT/US00/19735 | Jul. 23, 1999 |
| 10/100,683 | Continuation-in-part of | PCT/US00/19735 | Jul. 20, 2000 |
| PCT/US00/19735 | Non-provisional of | 60/145,220 | Jul. 23, 1999 |
| 10/100,683 | Continuation-in-part of | PZ042P1C1 | Feb. 01, 2002 |
| PZ042P1C1 | Continuation of | 09/781,417 | Feb. 13, 2001 |
| 09/781,417 | Continuation-in-part of | PCT/US00/22325 | Aug. 16, 2000 |
| 10/100,683 | Continuation-in-part of | 09/781,417 | Feb. 13, 2001 |
| 09/781,417 | Continuation-in-part of | PCT/US00/22325 | Aug. 16, 2000 |
| 10/100,683 | Continuation-in-part of | PCT/US00/22325 | Aug. 16, 2000 |
| PCT/US00/22325 | Non-provisional of | 60/149,182 | Aug. 17, 1999 |
| 10/100,683 | Continuation-in-part of | 09/789,561 | Feb. 22, 2001 |
| 09/789,561 | Continuation-in-part of | PCT/US00/24008 | Aug. 31, 2000 |
| 10/100,683 | Continuation-in-part of | PCT/US00/24008 | Aug. 31, 2000 |
| PCT/US00/24008 | Non-provisional of | 60/152,315 | Sep. 03, 1999 |
| PCT/US00/24008 | Non-provisional of | 60/152,317 | Sep. 03, 1999 |
| 10/100,683 | Continuation-in-part of | 09/800,729 | Mar. 08, 2001 |
| 09/800,729 | Continuation-in-part of | PCT/US00/26013 | Sep. 22, 2000 |
| 10/100,683 | Continuation-in-part of | PCT/US00/26013 | Sep. 22, 2000 |
| PCT/US00/26013 | Non-provisional of | 60/155,709 | Sep. 24, 1999 |
| 10/100,683 | Continuation-in-part of | 09/832,129 | Apr. 11, 2001 |
| 09/832,129 | Continuation-in-part of | PCT/US00/28664 | Oct. 17, 2000 |
| 10/100,683 | Continuation-in-part of | PCT/US00/28664 | Oct. 17, 2000 |
| PCT/US00/28664 | Non-provisional of | 60/163,085 | Nov. 02, 1999 |
| PCT/US00/28664 | Non-provisional of | 60/172,411 | Dec. 17, 1999 |
| 10/100,683 | Continuation-in-part of | PCT/US00/29363 | Oct. 25, 2000 |
| PCT/US00/29363 | Non-provisional of | 60/215,139 | Jun. 30, 2000 |
| PCT/US00/29363 | Non-provisional of | 60/162,239 | Oct. 29, 1999 |
| 10/100,683 | Continuation-in-part of | PCT/US00/29360 | Oct. 25, 2000 |
| PCT/US00/29360 | Non-provisional of | 60/215,138 | Jun. 30, 2000 |
| PCT/US00/29360 | Non-provisional of | 60/162,211 | Oct. 29, 1999 |
| 10/100,683 | Continuation-in-part of | PCT/US00/29362 | Oct. 25, 2000 |
| PCT/US00/29362 | Non-provisional of | 60/215,131 | Jun. 30, 2000 |
| PCT/US00/29362 | Non-provisional of | 60/162,240 | Oct. 29, 1999 |
| 10/100,683 | Continuation-in-part of | PCT/US00/29365 | Oct. 25, 2000 |
| PCT/US00/29365 | Non-provisional of | 60/219,666 | Jul. 21, 2000 |
| PCT/US00/29365 | Non-provisional of | 60/162,237 | Oct. 29, 1999 |
| 10/100,683 | Continuation-in-part of | PCT/US00/29364 | Oct. 25, 2000 |
| PCT/US00/29364 | Non-provisional of | 60/215,134 | Jun. 30, 2000 |
| PCT/US00/29364 | Non-provisional of | 60/162,238 | Oct. 29, 1999 |
| 10/100,683 | Continuation-in-part of | PCT/US00/30040 | Nov. 01, 2000 |
| PCT/US00/30040 | Non-provisional of | 60/215,130 | Jun. 30, 2000 |
| PCT/US00/30040 | Non-provisional of | 60/163,580 | Nov. 05, 1999 |
| 10/100,683 | Continuation-in-part of | PCT/US00/30037 | Nov. 01, 2000 |
| PCT/US00/30037 | Non-provisional of | 60/215,137 | Jun. 30, 2000 |
| PCT/US00/30037 | Non-provisional of | 60/163,577 | Nov. 05, 1999 |
| 10/100,683 | Continuation-in-part of | PCT/US00/30045 | Nov. 01, 2000 |
| PCT/US00/30045 | Non-provisional of | 60/215,133 | Jun. 30, 2000 |
| PCT/US00/30045 | Non-provisional of | 60/163,581 | Nov. 05, 1999 |
| 10/100,683 | Continuation-in-part of | PCT/US00/30036 | Nov. 01, 2000 |
| PCT/US00/30036 | Non-provisional of | 60/221,366 | Jul. 27, 2000 |
| PCT/US00/30036 | Non-provisional of | 60/163,576 | Nov. 05, 1999 |
| 10/100,683 | Continuation-in-part of | PCT/US00/30039 | Nov. 01, 2000 |
| PCT/US00/30039 | Non-provisional of | 60/221,367 | Jul. 27, 2000 |
| PCT/US00/30039 | Non-provisional of | 60/195,296 | Apr. 07, 2000 |
| PCT/US00/30039 | Non-provisional of | 60/164,344 | Nov. 09, 1999 |
| 10/100,683 | Continuation-in-part of | PCT/US00/30654 | Nov. 08, 2000 |
| PCT/US00/30654 | Non-provisional of | 60/221,142 | Jul. 27, 2000 |
| PCT/US00/30654 | Non-provisional of | 60/164,835 | Nov. 12, 1999 |
| 10/100,683 | Continuation-in-part of | PCT/US00/30628 | Nov. 08, 2000 |
| PCT/US00/30628 | Non-provisional of | 60/215,140 | Jun. 30, 2000 |
| PCT/US00/30628 | Non-provisional of | 60/164,744 | Nov. 12, 1999 |
| 10/100,683 | Continuation-in-part of | PCT/US00/30653 | Nov. 08, 2000 |
| PCT/US00/30653 | Non-provisional of | 60/221,193 | Jul. 27, 2000 |
| PCT/US00/30653 | Non-provisional of | 60/164,735 | Nov. 12, 1999 |
| 10/100,683 | Continuation-in-part of | PCT/US00/30629 | Nov. 08, 2000 |
| PCT/US00/30629 | Non-provisional of | 60/222,904 | Aug. 03, 2000 |
| PCT/US00/30629 | Non-provisional of | 60/164,825 | Nov. 12, 1999 |
| 10/100,683 | Continuation-in-part of | PCT/US00/30679 | Nov. 08, 2000 |
| PCT/US00/30679 | Non-provisional of | 60/224,007 | Aug. 04, 2000 |
| PCT/US00/30679 | Non-provisional of | 60/164,834 | Nov. 12, 1999 |
| 10/100,683 | Continuation-in-part of | PCT/US00/30674 | Nov. 08, 2000 |
| PCT/US00/30674 | Non-provisional of | 60/215,128 | Jun. 30, 2000 |
| PCT/US00/30674 | Non-provisional of | 60/164,750 | Nov. 12, 1999 |
| 10/100,683 | Continuation-in-part of | PCT/US00/31162 | Nov. 15, 2000 |
| 60/215,136 | Non-provisional of | 60/215,136 | Jun. 30, 2000 |
| 60/215,136 | Non-provisional of | 60/166,415 | Nov. 19, 1999 |
| 10/100,683 | Continuation-in-part of | PCT/US00/31282 | Nov. 15, 2000 |
| PCT/US00/31282 | Non-provisional of | 60/219,665 | Jul. 21, 2000 |
| PCT/US00/31282 | Non-provisional of | 60/166,414 | Nov. 19, 1999 |
| 10/100,683 | Continuation-in-part of | PCT/US00/30657 | Nov. 08, 2000 |
| PCT/US00/30657 | Non-provisional of | 60/215,132 | Jun. 30, 2000 |
| PCT/US00/30657 | Non-provisional of | 60/164,731 | Nov. 12, 1999 |
| 10/100,683 | Continuation-in-part of | PCT/US01/01396 | Jan. 17, 2001 |
| 60/256,968 | Non-provisional of | 60/256,968 | Dec. 21, 2000 |
| 60/256,968 | Non-provisional of | 60/226,280 | Aug. 18, 2000 |
| 10/100,683 | Continuation-in-part of | PCT/US01/01387 | Jan. 17, 2001 |
| 60/259,803 | Non-provisional of | 60/259,803 | Jan. 05, 2001 |
| 60/259,803 | Non-provisional of | 60/226,380 | Aug. 18, 2000 |
| 10/100,683 | Continuation-in-part of | PCT/US01/01567 | Jan. 17, 2001 |
| PCT/US01/01567 | Non-provisional of | 60/228,084 | Aug. 28, 2000 |
| 10/100,683 | Continuation-in-part of | PCT/US01/01431 | Jan. 17, 2001 |
| PCT/US01/01431 | Non-provisional of | 60/231,968 | Sep. 12, 2000 |
| PCT/US01/01431 | Continuation-in-part of | 09/915,582 | Jul. 27, 2001 |
| 10/100,683 | Continuation-in-part of | PCT/US01/01432 | Jan. 17, 2001 |
| PCT/US01/01432 | Non-provisional of | 60/236,326 | Sep. 29, 2000 |
| 10/100,683 | Continuation-in-part of | PCT/US01/00544 | Jan. 09, 2001 |
| PCT/US01/00544 | Non-provisional of | 60/234,211 | Sep. 20, 2000 |
| 10/100,683 | Continuation-in-part of | PCT/US01/01435 | Jan. 17, 2001 |
| PCT/US01/01435 | Non-provisional of | 60/226,282 | Aug. 18, 2000 |
| 10/100,683 | Continuation-in-part of | PCT/US01/01386 | Jan. 17, 2001 |
| PCT/US01/01386 | Non-provisional of | 60/232,104 | Sep. 12, 2000 |
| 10/100,683 | Continuation-in-part of | PCT/US01/01565 | Jan. 17, 2001 |
| PCT/US01/01565 | Non-provisional of | 60/234,210 | Sep. 20, 2000 |
| 10/100,683 | Continuation-in-part of | PCT/US01/01394 | Jan. 17, 2001 |
| PCT/US01/01394 | Non-provisional of | 60/259,805 | Jan. 05, 2001 |
| PCT/US01/01394 | Non-provisional of | 60/226,278 | Aug. 18, 2000 |
| 10/100,683 | Continuation-in-part of | PCT/US01/01434 | Jan. 17, 2001 |
| PCT/US01/01434 | Non-provisional of | 60/259,678 | Jan. 05, 2001 |
| PCT/US01/01434 | Non-provisional of | 60/226,279 | Aug. 18, 2000 |
| 10/100,683 | Continuation-in-part of | PCT/US01/01397 | Jan. 17, 2001 |
| PCT/US01/01397 | Non-provisional of | 60/226,281 | Aug. 18, 2000 |
| 10/100,683 | Continuation-in-part of | PCT/US01/01385 | Jan. 17, 2001 |
| PCT/US01/01385 | Non-provisional of | 60/231,969 | Sep. 12, 2000 |
| 10/100,683 | Continuation-in-part of | PCT/US01/01384 | Jan. 17, 2001 |
| PCT/US01/01384 | Non-provisional of | 60/259,516 | Jan. 04, 2001 |
| PCT/US01/01384 | Non-provisional of | 60/228,086 | Aug. 28, 2000 |
| 10/100,683 | Continuation-in-part of | PCT/US01/01383 | Jan. 17, 2001 |
| PCT/US01/01383 | Non-provisional of | 60/259,804 | Jan. 05, 2001 |
| PCT/US01/01383 | Non-provisional of | 60/228,083 | Aug. 28, 2000 |
| 10/100,683 | Continuation-in-part of | PCT/US02/05064 | Feb. 21, 2002 |
| PCT/US02/05064 | Non-provisional of | 60/304,444 | Jul. 12, 2001 |
| PCT/US02/05064 | Non-provisional of | 60/270,658 | Feb. 23, 2001 |
| 10/100,683 | Continuation-in-part of | PCT/US02/05301 | Feb. 21, 2002 |
| PCT/US02/05301 | Non-provisional of | 60/304,417 | Jul. 12, 2001 |
| PCT/US02/05301 | Non-provisional of | 60/270,625 | Feb. 23, 2001 |
| 10/100,683 | Non-provisional of | 60/304,121 | Jul. 11, 2001 |
| 10/100,683 | Non-provisional of | 60/295,869 | Jun. 06, 2001 |
| 10/100,683 | Non-provisional of | 60/325,209 | Sep. 28, 2001 |
| 10/100,683 | Non-provisional of | 60/311,085 | Aug. 10, 2001 |
| 10/100,683 | Non-provisional of | 60/330,629 | Oct. 26, 2001 |
| 10/100,683 | Non-provisional of | 60/331,046 | Nov. 07, 2001 |
| 10/100,683 | Non-provisional of | 60/358,554 | Feb. 22, 2002 |
| 10/100,683 | Non-provisional of | 60/358,714 | Feb. 25, 2002 |

; wherein each of the above applications are all herein incorporated by reference in their entirety.

### FIELD OF THE INVENTION

[0002] The present invention relates to human secreted proteins/polypeptides, and isolated nucleic acid molecules encoding said proteins/polypeptides, useful for detecting, preventing, diagnosing, prognosticating, treating, and/or ameliorating diabetes mellitus and conditions related thereto. Antibodies that bind these polypeptides are also encompassed by the present invention. Also encompassed by the invention are vectors, host cells, and recombinant and synthetic methods for producing said polynucleotides, polypeptides, and/or antibodies. The invention further encompasses screening methods for identifying agonists and antagonists of polynucleotides and polypeptides of the invention. The present invention further encompasses methods and compositions for inhibiting or enhancing the production and function of the polypeptides of the present invention.

### BACKGROUND OF THE INVENTION

[0003] Over the past few decades, an increasing percentage of the population has become diabetic. Diabetes mellitus is categorized into two types: Type I, known as Insulin-Dependent Diabetes Mellitus (IDDM), or Type II, known as Non-Insulin-Dependent Diabetes Mellitus (NIDDM). IDDM is an autoimmune disorder in which the insulin-secreting pancreatic beta cells of the islets of Langerhans are destroyed. In these individuals, recombinant insulin therapy is employed to maintain glucose homeostasis and normal energy metabolism. NIDDM, on the other hand, is a polygenic disorder with no one gene responsible for the progression of the disease.

[0004] In NIDDM, insulin resistance eventually leads to the abolishment of insulin secretion resulting in insulin deficiency. Insulin resistance, at least in part, ensues from a block at the level of glucose uptake and phosphorylation in humans. Diabetics demonstrate a decrease in expression in adipose tissue of insulin-receptor substrate 1 (“IRS1”) (Carvalho et al., FASEB J 13(15):2173-8 (1999)), glucose transporter 4 (“GLUT4”) (Garvey et al., Diabetes 41(4):465-75 (1992)), and the novel abundant protein M gene transcript 1 (“apM1”) (Statnick et al., Int J Exp Diabetes 1(2): 81-8 (2000)), as well as other as of yet unidentified factors. Insulin deficiency in NIDDM leads to failure of normal pancreatic beta-cell function and eventually to pancreatic-beta cell death.

[0005] Insulin affects fat, muscle, and liver. Insulin is the major regulator of energy metabolism. Malfunctioning of any step(s) in insulin secretion and/or action can lead to many disorders, including for example the dysregulation of oxygen utilization, adipogenesis, glycogenesis, lipogenesis, glucose uptake, protein synthesis, thermogenesis, and maintenance of the basal metabolic rate. This malfunctioning results in diseases and/or disorders that include, but are not limited to, hyperinsulinemia, insulin resistance, insulin deficiency, hyperglycemia, hyperlipidemia, hyperketonemia, and diabetes.

[0006] Numerous debilitating diabetes-related secondary effects include, but are not limited to, obesity, forms of blindness (cataracts and diabetic retinopathy), limb amputations, kidney failure, fatty liver, coronary artery disease, and neuropathy.

[0007] Some of the current drugs used to treat insulin resistance and/or diabetes (e.g., insulin secratogogues—sulfonylurea, insulin sensitizers—thiazolidenediones and metformin, and alpha-glucosidase and lipase inhibitors) are inadequate due to the dosage amounts and frequency with which they have to be administered as a result of poor pharmacokinetic properties, the lack of effective control over blood sugar levels, and potential side effects, among other reasons. Diabetes Therapeutic proteins in their native state or when recombinantly produced exhibit a rapid in vivo clearance. Typically, significant amounts of therapeutics are required to be effective during therapy. In addition, small molecules smaller than the 20 kDa range can be readily filtered through the renal tubules (glomerulus) leading to dose-dependent nephrotoxicity. Therefore, there is a need for improvement in treatment (e.g., a need for prolonging the effects of therapeutics of diabetes and/or diabetes related conditions).

### SUMMARY OF THE INVENTION

[0008] The present invention encompasses human secreted proteins/polypeptides, and isolated nucleic acid molecules encoding said proteins/polypeptides, useful for detecting, preventing, diagnosing, prognosticating, treating, and/or ameliorating diabetes mellitus and conditions related thereto. Antibodies that bind these polypeptides are also encompassed by the present invention; as are vectors, host cells, and recombinant and synthetic methods for producing said polynucleotides, polypeptides, and/or antibodies. The invention further encompasses screening methods for identifying agonists and antagonists of polynucleotides and polypeptides of the invention. The present invention also encompasses methods and compositions for inhibiting or enhancing the production and function of the polypeptides of the present invention.

### DETAILED DESCRIPTION

[0009] Polynucleotides and Polypeptides of the Invention

[0010] Description of Table 1A

[0011] Table 1A summarizes information concerning certain polypnucleotides and polypeptides of the invention. The first column provides the gene number in the application for each clone identifier. The second column provides a unique clone identifier, “Clone ID:”, for a cDNA clone related to each contig sequence disclosed in Table 1A. Third column, the cDNA Clones identified in the second column were deposited as indicated in the third column (i.e. by ATCC Deposit No:Z and deposit date). Some of the deposits contain multiple different clones corresponding to the same gene. In the fourth column, “Vector” refers to the type of vector contained in the corresponding cDNA Clone identified in the second column. In the fifth column, the nucleotide sequence identified as “NT SEQ ID NO:X” was assembled from partially homologous (“overlapping”) sequences obtained from the corresponding cDNA clone identified in the second column and, in some cases, from additional related cDNA clones. The overlapping sequences were assembled into a single contiguous sequence of high redundancy (usually three to five overlapping sequences at each nucleotide position), resulting in a final sequence identified as SEQ ID NO:X. In the sixth column, “Total NT Seq.” refers to the total number of nucleotides in the contig sequence identified as SEQ ID NO:X.” The deposited clone may contain all or most of these sequences, reflected by the nucleotide position indicated as “5′ NT of Clone Seq.” (seventh column) and the “3′ NT of Clone Seq.” (eighth column) of SEQ ID NO:X. In the ninth column, the nucleotide position of SEQ ID NO:X of the putative start codon (methionine) is identified as “5′ NT of Start Codon.” Similarly, in column ten, the nucleotide position of SEQ ID NO:X of the predicted signal sequence is identified as “5′ NT of First AA of Signal Pep.” In the eleventh column, the translated amino acid sequence, beginning with the methionine, is identified as “AA SEQ ID NO:Y,” although other reading frames can also be routinely translated using known molecular biology techniques. The polypeptides produced by these alternative open reading frames are specifically contemplated by the present invention.

[0012] In the twelfth and thirteenth columns of Table 1A, the first and last amino acid position of SEQ ID NO:Y of the predicted signal peptide is identified as “First AA of Sig Pep” and “Last AA of Sig Pep.” In the fourteenth column, the predicted first amino acid position of SEQ ID NO:Y of the secreted portion is identified as “Predicted First AA of Secreted Portion”. The amino acid position of SEQ ID NO:Y of the last amino acid encoded by the open reading frame is identified in the fifteenth column as “Last AA of ORF”.

[0013] SEQ ID NO:X (where X may be any of the polynucleotide sequences disclosed in the sequence listing) and the translated SEQ ID NO:Y (where Y may be any of the polypeptide sequences disclosed in the sequence listing) are sufficiently accurate and otherwise suitable for a variety of uses well known in the art and described further below. For instance, SEQ ID NO:X is useful for designing nucleic acid hybridization probes that will detect nucleic acid sequences contained in SEQ ID NO:X or the cDNA contained in the deposited clone. These probes will also hybridize to nucleic acid molecules in biological samples, thereby enabling a variety of forensic and diagnostic methods of the invention. Similarly, polypeptides identified from SEQ ID NO:Y may be used, for example, to generate antibodies which bind specifically to proteins containing the polypeptides and the secreted proteins encoded by the cDNA clones identified in Table 1A and/or elsewhere herein

[0014] Nevertheless, DNA sequences generated by sequencing reactions can contain sequencing errors. The errors exist as misidentified nucleotides, or as insertions or deletions of nucleotides in the generated DNA sequence. The erroneously inserted or deleted nucleotides cause frame shifts in the reading frames of the predicted amino acid sequence. In these cases, the predicted amino acid sequence diverges from the actual amino acid sequence, even though the generated DNA sequence may be greater than 99.9% identical to the actual DNA sequence (for example, one base insertion or deletion in an open reading frame of over 1000 bases).

[0015] Accordingly, for those applications requiring precision in the nucleotide sequence or the amino acid sequence, the present invention provides not only the generated nucleotide sequence identified as SEQ ID NO:X, and the predicted translated amino acid sequence identified as SEQ ID NO:Y, but also a sample of plasmid DNA containing a human cDNA of the invention deposited with the ATCC, as set forth in Table 1A. The nucleotide sequence of each deposited plasmid can readily be determined by sequencing the deposited plasmid in accordance with known methods

[0016] The predicted amino acid sequence can then be verified from such deposits. Moreover, the amino acid sequence of the protein encoded by a particular plasmid can also be directly determined by peptide sequencing or by expressing the protein in a suitable host cell containing the deposited human cDNA, collecting the protein, and determining its sequence.

[0017] Also provided in Table 1A is the name of the vector which contains the cDNA plasmid. Each vector is routinely used in the art. The following additional information is provided for convenience.

[0018] Vectors Lambda Zap (U.S. Pat. Nos. 5,128,256 and 5,286,636), Uni-Zap XR (U.S. Pat. Nos. 5,128,256 and 5,286,636), Zap Express (U.S. Pat. Nos. 5,128,256 and 5,286,636), pBluescript (pBS) (Short, J. M. et al., Nucleic Acids Res. 16:7583-7600 (1988); Alting-Mees, M. A. and Short, J. M., Nucleic Acids Res. 17:9494 (1989)) and pBK (Alting-Mees, M. A. et al., Strategies 5:58-61 (1992)) are commercially available from Stratagene Cloning Systems, Inc., 11011 N. Torrey Pines Road, La Jolla, Calif., 92037. pBS contains an ampicillin resistance gene and pBK contains a neomycin resistance gene. Phagemid pBS may be excised from the Lambda Zap and Uni-Zap XR vectors, and phagemid pBK may be excised from the Zap Express vector. Both phagemids may be transformed into E. coli strain XL-1 Blue, also available from Stratagene

[0019] Vectors pSport1, pCMVSport 1.0, pCMVSport 2.0 and pCMVSport 3.0, were obtained from Life Technologies, Inc., P.O. Box 6009, Gaithersburg, Md. 20897. All Sport vectors contain an ampicillin resistance gene and may be transformed into E. coli strain DH10B, also available from Life Technologies. See, for instance, Gruber, C. E., et al., Focus 15:59 (1993). Vector lafmid BA (Bento Soares, Columbia University, New York, N.Y.) contains an ampicillin resistance gene and can be transformed into E. coli strain XL-1 Blue. Vector pCR®2.1, which is available from Invitrogen, 1600 Faraday Avenue, Carlsbad, Calif. 92008, contains an ampicillin resistance gene and may be transformed into E. coli strain DH10B, available from Life Technologies. See, for instance, Clark, J. M., Nuc. Acids Res. 16:9677-9686 (1988) and Mead, D. et al., Bio/Technology 9: (1991).

[0020] The present invention also relates to the genes corresponding to SEQ ID NO:X, SEQ ID NO:Y, and/or a deposited cDNA (cDNA Clone ID). The corresponding gene can be isolated in accordance with known methods using the sequence information disclosed herein. Such methods include, but are not limited to, preparing probes or primers from the disclosed sequence and identifying or amplifying the corresponding gene from appropriate sources of genomic material.

[0021] Also provided in the present invention are allelic variants, orthologs, and/or species homologs. Procedures known in the art can be used to obtain full-length genes, allelic variants, splice variants, full-length coding portions, orthologs, and/or species homologs of genes corresponding to SEQ ID NO:X and SEQ ID NO:Y using information from the sequences disclosed herein or the clones deposited with the ATCC. For example, allelic variants and/or species homologs may be isolated and identified by making suitable probes or primers from the sequences provided herein and screening a suitable nucleic acid source for allelic variants and/or the desired homologue.

[0022] The present invention provides a polynucleotide comprising, or alternatively consisting of, the nucleic acid sequence of SEQ ID NO:X and/or a cDNA contained in ATCC Deposit No. Z. The present invention also provides a polypeptide comprising, or alternatively, consisting of, the polypeptide sequence of SEQ ID NO:Y, a polypeptide encoded by SEQ ID NO:X, and/or a polypeptide encoded by a cDNA contained in ATCC deposit No. Z. Polynucleotides encoding a polypeptide comprising, or alternatively consisting of the polypeptide sequence of SEQ ID NO:Y, a polypeptide encoded by SEQ ID NO:X and/or a polypeptide encoded by the cDNA contained in ATCC Deposit No. Z, are also encompassed by the invention. The present invention further encompasses a polynucleotide comprising, or alternatively consisting of the complement of the nucleic acid sequence of SEQ ID NO:X, and/or the complement of the coding strand of the cDNA contained in ATCC Deposit No. Z.

Description of Table 1B (Comprised of Tables 1B.1 and 1B.2)

[0023] Table 1B.1 and Table 1B.2 summarize some of the polynucleotides encompassed by the invention (including cDNA clones related to the sequences (Clone ID:), contig sequences (contig identifier (Contig ID:) and contig nucleotide sequence identifiers (SEQ ID NO:X)) and further summarizes certain characteristics of these polynucleotides and the polypeptides encoded thereby. The first column of Tables 1B.1 and 1B.2 provide the gene numbers in the application for each clone identifier. The second column of Tables 1B.1 and 1B.2 provide unique clone identifiers, “Clone ID:”, for cDNA clones related to each contig sequence disclosed in Table 1A and/or Table 1B. The third column of Tables 1B.1 and 1B.2 provide unique contig identifiers, “Contig ID:” for each of the contig sequences disclosed in these tables. The fourth column of Tables 1B.1 and 1B.2 provide the sequence identifiers, “SEQ ID NO:X”, for each of the contig sequences disclosed in Table 1A and/or 1B.

[0024] Table 1B.1

[0025] The fifth column of Table 1B.1, “ORF (From-To)”, provides the location (i.e., nucleotide position numbers) within the polynucleotide sequence of SEQ ID NO:X that delineates the preferred open reading frame (ORF) that encodes the amino acid sequence shown in the sequence listing and referenced in Table 1B.1 as SEQ ID NO:Y (column 6). Column 7 of Table 1B.1 lists residues comprising predicted epitopes contained in the polypeptides encoded by each of the preferred ORFs (SEQ ID NO:Y). Identification of potential immunogenic regions was performed according to the method of Jameson and Wolf (CABIOS, 4; 181-186 (1988)); specifically, the Genetics Computer Group (GCG) implementation of this algorithm, embodied in the program PEPTIDESTRUCTURE (Wisconsin Package v10.0, Genetics Computer Group (GCG), Madison, Wisc.). This method returns a measure of the probability that a given residue is found on the surface of the protein. Regions where the antigenic index score is greater than 0.9 over at least 6 amino acids are indicated in Table 1B.1 as “Predicted Epitopes”. In particular embodiments, polypeptides of the invention comprise, or alternatively consist of, one, two, three, four, five or more of the predicted epitopes described in Table 1B.1. It will be appreciated that depending on the analytical criteria used to predict antigenic determinants, the exact address of the determinant may vary slightly. Column 8 of Table 1B.1 (“Tissue Distribution”) is described below in Table 1B.2 Column 5. Column 9 of Table 1B.1 (“Cytologic Band”) provides the chromosomal location of polynucleotides corresponding to SEQ ID NO:X. Chromosomal location was determined by finding exact matches to EST and cDNA sequences contained in the NCBI (National Center for Biotechnology Information) UniGene database. Given a presumptive chromosomal location, disease locus association was determined by comparison with the Morbid Map, derived from Online Mendelian Inheritance in Man (Online Mendelian Inheritance in Man, OMIM™. McKusick-Nathans Institute for Genetic Medicine, Johns Hopkins University (Baltimore, Md.) and National Center for Biotechnology Information, National Library of Medicine (Bethesda, Md.) 2000. World Wide Web URL: http://www.ncbi.nlm.nih.gov/omim/). If the putative chromosomal location of the Query overlaps with the chromosomal location of a Morbid Map entry, an OMIM identification number is disclosed in Table 1B.1, column 10 labeled “OMIM Disease Reference(s)”. A key to the OMIM reference identification numbers is provided in Table 5.

[0026] Table 1B.2

[0027] Column 5 of Table 1B.2, “Tissue Distribution” shows the expression profile of tissue, cells, and/or cell line libraries which express the polynucleotides of the invention. The first code number shown in Table 1B.2 column 5 (preceding the colon), represents the tissue/cell source identifier code corresponding to the key provided in Table 4. Expression of these polynucleotides was not observed in the other tissues and/or cell libraries tested. The second number in column 5 (following the colon), represents the number of times a sequence corresponding to the reference polynucleotide sequence (e.g., SEQ ID NO:X) was identified in the corresponding tissue/cell source. Those tissue/cell source identifier codes in which the first two letters are “AR” designate information generated using DNA array technology. Utilizing this technology, cDNAs were amplified by PCR and then transferred, in duplicate, onto the array. Gene expression was assayed through hybridization of first strand cDNA probes to the DNA array. cDNA probes were generated from total RNA extracted from a variety of different tissues and cell lines. Probe synthesis was performed in the presence of ³³P dCTP, using oligo(dT) to prime reverse transcription. After hybridization, high stringency washing conditions were employed to remove non-specific hybrids from the array. The remaining signal, emanating from each gene target, was measured using a Phosphorimager. Gene expression was reported as Phosphor Stimulating Luminescence (PSL) which reflects the level of phosphor signal generated from the probe hybridized to each of the gene targets represented on the array. A local background signal subtraction was performed before the total signal generated from each array was used to normalize gene expression between the different hybridizations. The value presented after “[array code]:” represents the mean of the duplicate values, following background subtraction and probe normalization. One of skill in the art could routinely use this information to identify normal and/or diseased tissue(s) which show a predominant expression pattern of the corresponding polynucleotide of the invention or to identify polynucleotides which show predominant and/or specific tissue and/or cell expression.

[0028] Description of Table 1C

[0029] Table 1C summarizes additional polynucleotides encompassed by the invention (including cDNA clones related to the sequences (Clone ID:), contig sequences (contig identifier (Contig ID:) contig nucleotide sequence identifiers (SEQ ID NO:X)), and genomic sequences (SEQ ID NO:B). The first column provides a unique clone identifier, “Clone ID:”, for a cDNA clone related to each contig sequence. The second column provides the sequence identifier, “SEQ ID NO:X”, for each contig sequence. The third column provides a unique contig identifier, “Contig ID:” for each contig sequence. The fourth column, provides a BAC identifier “BAC ID NO:A” for the BAC clone referenced in the corresponding row of the table. The fifth column provides the nucleotide sequence identifier, “SEQ ID NO:B” for a fragment of the BAC clone identified in column four of the corresponding row of the table. The sixth column, “Exon From-To”, provides the location (i.e., nucleotide position numbers) within the polynucleotide sequence of SEQ ID NO:B which delineate certain polynucleotides of the invention that are also exemplary members of polynucleotide sequences that encode polypeptides of the invention (e.g., polypeptides containing amino acid sequences encoded by the polynucleotide sequences delineated in column six, and fragments and variants thereof).

[0030] Description of Table 1D

[0031] Table 1D: In preferred embodiments, the present invention encompasses a method of detecting, preventing, diagnosing, prognosticating, treating, and/or ameliorating diabetes mellitus; comprising administering to a patient in which such treatment, prevention, or amelioration is desired a protein, nucleic acid, or antibody of the invention (or fragment or variant thereof) represented by Table 1A, Table 1B, and Table 1C, in an amount effective to detect, prevent, diagnose, prognosticate, treat, and/or ameliorate the disease or disorder.

[0032] As indicated in Table 1D, the polynucleotides, polypeptides, agonists, or antagonists of the present invention (including antibodies) can be used in assays to test for one or more biological activities. If these polynucleotides and polypeptides do exhibit activity in a particular assay, it is likely that these molecules may be involved in the diseases associated with the biological activity. Thus, the polynucleotides or polypeptides, or agonists or antagonists thereof (including antibodies) could be used to treat the associated disease.

[0033] Table 1D provides information related to biological activities for polynucleotides and polypeptides of the invention (including antibodies, agonists, and/or antagonists thereof). Table 1D also provides information related to assays which may be used to test polynucleotides and polypeptides of the invention (including antibodies, agonists, and/or antagonists thereof) for the corresponding biological activities. The first column (“Gene No.”) provides the gene number in the application for each clone identifier. The second column (“cDNA Clone ID:”) provides the unique clone identifier for each clone as previously described and indicated in Tables 1A, 1B, and 1C. The third column (“AA SEQ ID NO:Y”) indicates the Sequence Listing SEQ ID Number for polypeptide sequences encoded by the corresponding cDNA clones (also as indicated in Tables 1A, 1B, and 2). The fourth column (“Biological Activity”) indicates a biological activity corresponding to the indicated polypeptides (or polynucleotides encoding said polypeptides). The fifth column (“Exemplary Activity Assay”) further describes the corresponding biological activity and provides information pertaining to the various types of assays which may be performed to test, demonstrate, or quantify the corresponding biological activity. Table 1D describes the use of FMAT technology, inter alia, for testing or demonstrating various biological activities. Fluorometric microvolume assay technology (FMAT) is a fluorescence-based system which provides a means to perform nonradioactive cell- and bead-based assays to detect activation of cell signal transduction pathways. This technology was designed specifically for ligand binding and immunological assays. Using this technology, fluorescent cells or beads at the bottom of the well are detected as localized areas of concentrated fluorescence using a data processing system. Unbound flurophore comprising the background signal is ignored, allowing for a wide variety of homogeneous assays. FMAT technology may be used for peptide ligand binding assays, immunofluorescence, apoptosis, cytotoxicity, and bead-based immunocapture assays. See, Miraglia S et. al., “Homogeneous cell and bead based assays for highthroughput screening using flourometric microvolume assay technology,” Journal of Biomolecular Screening; 4:193-204 (1999). In particular, FMAT technology may be used to test, confirm, and/or identify the ability of polypeptides (including polypeptide fragments and variants) to activate signal transduction pathways. For example, FMAT technology may be used to test, confirm, and/or identify the ability of polypeptides to upregulate production of immunomodulatory proteins (such as, for example, interleukins, GM-CSF, Rantes, and Tumor Necrosis factors, as well as other cellular regulators (e.g. insulin)).

[0034] Table 1D also describes the use of kinase assays for testing, demonstrating, or quantifying biological activity. In this regard, the phosphorylation and de-phosphorylation of specific amino acid residues (e.g. Tyrosine, Serine, Threonine) on cell-signal transduction proteins provides a fast, reversible means for activation and de-activation of cellular signal transduction pathways. Moreover, cell signal transduction via phosphorylation/de-phosphorylation is crucial to the regulation of a wide variety of cellular processes (e.g. proliferation, differentiation, migration, apoptosis, etc.). Accordingly, kinase assays provide a powerful tool useful for testing, confirming, and/or identifying polypeptides (including polypeptide fragments and variants) that mediate cell signal transduction events via protein phosphorylation. See e.g., Forrer, P., Tamaskovic R., and Jaussi, R. “Enzyme-Linked Immunosorbent Assay for Measurement of JNK, ERK, and p38 Kinase Activities” Biol. Chem. 379(8-9): 1101-1110 (1998).

[0035] Description of Table 1E

[0036] Polynucleotides encoding polypeptides of the present invention can be used in assays to test for one or more biological activities. One such biological activity which may be tested includes the ability of polynucleotides and polypeptides of the invention to stimulate up-regulation or down-regulation of expression of particular genes and proteins. Hence, if polynucleotides and polypeptides of the present invention exhibit activity in altering particular gene and protein expression patterns, it is likely that these polynucleotides and polypeptides of the present invention may be involved in, or capable of effecting changes in, diseases associated with the altered gene and protein expression profiles. Hence, polynucleotides, polypeptides, or antibodies of the present invention could be used to treat said associated diseases.

[0037] TaqMan® assays may be performed to assess the ability of polynucleotides (and polypeptides they encode) to alter the expression pattern of particular “target” genes. TaqMan® reactions are performed to evaluate the ability of a test agent to induce or repress expression of specific genes in different cell types. TaqMan® gene expression quantification assays (“TaqMan® assays”) are well known to, and routinely performed by, those of ordinary skill in the art. TaqMan® assays are performed in a two step reverse transcription/polymerase chain reaction (RT-PCR). In the first (RT) step, cDNA is reverse transcribed from total RNA samples using random hexamer primers. In the second (PCR) step, PCR products are synthesized from the cDNA using gene specific primers.

[0038] To quantify gene expression the Taqman® PCR reaction exploits the 5′ nuclease activity of AmpliTaq Gold® DNA Polymerase to cleave a Taqman® probe (distinct from the primers) during PCR. The Taqman® probe contains a reporter dye at the 5′-end of the probe and a quencher dye at the 3′ end of the probe. When the probe is intact, the proximity of the reporter dye to the quencher dye results in suppression of the reporter fluorescence. During PCR, if the target of interest is present, the probe specifically anneals between the forward and reverse primer sites. AmpliTaq Fold DNA Polymerase then cleaves the probe between the reporter and quencher when the probe hybridizes to the target, resulting in increased fluorescence of the reporter (see FIG. 2). Accumulation of PCR products is detected directly by monitoring the increase in fluorescence of the reporter dye.

[0039] After the probe fragments are displaced from the target, polymerization of the strand continues. The 3′-end of the probe is blocked to prevent extension of the probe during PCR. This process occurs in every cycle and does not interfere with the exponential accumulation of product. The increase in fluorescence signal is detected only if the target sequence is complementary to the probe and is amplified during PCR. Because of these requirements, any nonspecific amplification is not detected.

[0040] For test sample preparation, vector controls or constructs containing the coding sequence for the gene of interest are transfected into cells, such as for example 293T cells, and supernatants collected after 48 hours. For cell treatment and RNA isolation, multiple primary human cells or human cell lines are used; such cells may include but are not limited to, Normal Human Dermal Fibroblasts, Aortic Smooth Muscle, Human Umbilical Vein Endothelial Cells, HepG2, Daudi, Jurkat, U937, Caco, and THP-1 cell lines. Cells are plated in growth media and growth is arrested by culturing without media change for 3 days, or by switching cells to low serum media and incubating overnight. Cells are treated for 1, 6, or 24 hours with either vector control supernatant or sample supernatant (or purified/partially purified protein preparations in buffer). Total RNA is isolated; for example, by using Trizol extraction or by using the Ambion RNAqueous™-4PCR RNA isolation system. Expression levels of multiple genes are analyzed using TAQMAN, and expression in the test sample is compared to control vector samples to identify genes induced or repressed. Each of the above described techniques are well known to, and routinely performed by, those of ordinary skill in the art.

[0041] Table 1E indicates particular disease classes and preferred indications for which polynucleotides, polypeptides, or antibodies of the present invention may be used in detecting, diagnosing, preventing, treating and/or ameliorating said diseases and disorders based on “target” gene expression patterns which may be up- or down-regulated by polynucleotides (and the encoded polypeptides) corresponding to each indicated cDNA Clone ID (shown in Table 1E, Column 2).

[0042] Thus, in preferred embodiments, the present invention encompasses a method of detecting, diagnosing, preventing, treating, and/or ameliorating a disease or disorder listed in the “Disease Class” and/or “Preferred Indication” columns of Table 1E; comprising administering to a patient in which such detection, diagnosis, prevention, or treatment is desired a protein, nucleic acid, or antibody of the invention (or fragment or variant thereof) in an amount effective to detect, diagnose, prevent, treat, or ameliorate the disease or disorder. The first and second columns of Table 1D show the “Gene No.” and “cDNA Clone ID No.”, respectively, indicating certain nucleic acids and proteins (or antibodies against the same) of the invention (including polynucleotide, polypeptide, and antibody fragments or variants thereof) that may be used in detecting, diagnosing, preventing, treating, or ameliorating the disease(s) or disorder(s) indicated in the corresponding row in the “Disease Class” or “Preferred Indication” Columns of Table 1E.

[0043] In another embodiment, the present invention also encompasses methods of detecting, diagnosing, preventing, treating, or ameliorating a disease or disorder listed in the “Disease Class” or “Preferred Indication” Columns of Table 1E; comprising administering to a patient combinations of the proteins, nucleic acids, or antibodies of the invention (or fragments or variants thereof), sharing similar indications as shown in the corresponding rows in the “Disease Class” or “Preferred Indication” Columns of Table 1E.

[0044] The “Disease Class” Column of Table 1E provides a categorized descriptive heading for diseases, disorders, and/or conditions (more fully described below) that may be detected, diagnosed, prevented, treated, or ameliorated by a protein, nucleic acid, or antibody of the invention (or fragment or variant thereof).

[0045] The “Preferred Indication” Column of Table 1E describes diseases, disorders, and/or conditions that may be detected, diagnosed, prevented, treated, or ameliorated by a protein, nucleic acid, or antibody of the invention (or fragment or variant thereof).

[0046] The “Cell Line” and “Exemplary Targets” Columns of Table 1E indicate particular cell lines and target genes, respectively, which may show altered gene expression patterns (i.e., up- or down-regulation of the indicated target gene) in Taqman assays, performed as described above, utilizing polynucleotides of the cDNA Clone ID shown in the corresponding row. Alteration of expression patterns of the indicated “Exemplary Target” genes is correlated with a particular “Disease Class” and/or “Preferred Indication” as shown in the corresponding row under the respective column headings.

[0047] The “Exemplary Accessions” Column indicates GenBank Accessions (available online through the National Center for Biotechnology Information (NCBI) at http://www.ncbi.nlm.nih.gov/) which correspond to the “Exemplary Targets” shown in the adjacent row.

[0048] The recitation of “Cancer” in the “Disease Class” Column indicates that the corresponding nucleic acid and protein, or antibody against the same, of the invention (or fragment or variant thereof) may be used for example, to detect, diagnose, prevent, treat, and/or ameliorate neoplastic diseases and/or disorders (e.g., leukemias, cancers, etc., as described below under “Hyperproliferative Disorders”).

[0049] The recitation of “Immune” in the “Disease Class” column indicates that the corresponding nucleic acid and protein, or antibody against the same, of the invention (or fragment or variant thereof), may be used for example, to detect, diagnose, prevent, treat, and/or ameliorate diseases and/or disorders relating to neoplastic diseases (e.g., as described below under “Hyperproliferative Disorders”), blood disorders (e.g., as described below under “Immune Activity” “Cardiovascular Disorders” and/or “Blood-Related Disorders”), and infections (e.g., as described below under “Infectious Disease”).

[0050] The recitation of “Angiogenesis” in the “Disease Class” column indicates that the corresponding nucleic acid and protein, or antibody against the same, of the invention (or fragment or variant thereof), may be used for example, to detect, diagnose, treat, prevent, and/or ameliorate diseases and/or disorders relating to neoplastic diseases (e.g., as described below under “Hyperproliferative Disorders”), diseases and/or disorders of the cardiovascular system (e.g., as described below under “Cardiovascular Disorders”), diseases and/or disorders involving cellular and genetic abnormalities (e.g., as described below under “Diseases at the Cellular Level”), diseases and/or disorders involving angiogenesis (e.g., as described below under “Anti-Angiogenesis Activity”), to promote or inhibit cell or tissue regeneration (e.g., as described below under “Regeneration”), or to promote wound healing (e.g., as described below under “Wound Healing and Epithelial Cell Proliferation”).

[0051] The recitation of “Diabetes” in the “Disease Class” column indicates that the corresponding nucleic acid and protein, or antibody against the same, of the invention (or fragment or variant thereof), may be used for example, to detect, diagnose, treat, prevent, and/or ameliorate diabetes (including diabetes mellitus types I and II), as well as diseases and/or disorders associated with, or consequential to, diabetes (e.g. as described below under “Endocrine Disorders,” “Renal Disorders,” and “Gastrointestinal Disorders”).

[0052] Description of Table 2

[0053] Table 2 summarizes homology and features of some of the polypeptides of the invention. The first column provides a unique clone identifier, “Clone ID:”, corresponding to a cDNA clone disclosed in Table 1A or Table 1B. The second column provides the unique contig identifier, “Contig ID:” corresponding to contigs in Table 1B and allowing for correlation with the information in Table 1B. The third column provides the sequence identifier, “SEQ ID NO:X”, for the contig polynucleotide sequence. The fourth column provides the analysis method by which the homology/identity disclosed in the Table was determined. Comparisons were made between polypeptides encoded by the polynucleotides of the invention and either a non-redundant protein database (herein referred to as “NR”), or a database of protein families (herein referred to as “PFAM”) as further described below. The fifth column provides a description of the PFAM/NR hit having a significant match to a polypeptide of the invention. Column six provides the accession number of the PFAM/NR hit disclosed in the fifth column. Column seven, “Score/Percent Identity”, provides a quality score or the percent identity, of the hit disclosed in columns five and six. Columns 8 and 9, “NT From” and “NT To” respectively, delineate the polynucleotides in “SEQ ID NO:X” that encode a polypeptide having a significant match to the PFAM/NR database as disclosed in the fifth and sixth columns. In specific embodiments polypeptides of the invention comprise, or alternatively consist of, an amino acid sequence encoded by a polynucleotide in SEQ ID NO:X as delineated in columns 8 and 9, or fragments or variants thereof.

[0054] Description of Table 3

[0055] Table 3 provides polynucleotide sequences that may be disclaimed according to certain embodiments of the invention. The first column provides a unique clone identifier, “Clone ID”, for a cDNA clone related to contig sequences disclosed in Table 1B. The second column provides the sequence identifier, “SEQ ID NO:X”, for contig sequences disclosed in Table 1A and/or Table 1B. The third column provides the unique contig identifier, “Contig ID:”, for contigs disclosed in Table 1B. The fourth column provides a unique integer ‘a’ where ‘a’ is any integer between 1 and the final nucleotide minus 15 of SEQ ID NO:X, and the fifth column provides a unique integer ‘b’ where ‘b’ is any integer between 15 and the final nucleotide of SEQ ID NO:X, where both a and b correspond to the positions of nucleotide residues shown in SEQ ID NO:X, and where b is greater than or equal to a+14. For each of the polynucleotides shown as SEQ ID NO:X, the uniquely defined integers can be substituted into the general formula of a−b, and used to describe polynucleotides which may be preferably excluded from the invention. In certain embodiments, preferably excluded from the invention are at least one, two, three, four, five, ten, or more of the polynucleotide sequence(s) having the accession number(s) disclosed in the sixth column of this Table (including for example, published sequence in connection with a particular BAC clone). In further embodiments, preferably excluded from the invention are the specific polynucleotide sequence(s) contained in the clones corresponding to at least one, two, three, four, five, ten, or more of the available material having the accession numbers identified in the sixth column of this Table (including for example, the actual sequence contained in an identified BAC clone).

[0056] Description of Table 4

[0057] Table 4 provides a key to the tissue/cell source identifier code disclosed in Table 1B.2, column 5. Column 1 provides the tissue/cell source identifier code disclosed in Table 1B.2, Column 5. Columns 2-5 provide a description of the tissue or cell source. Note that “Description” and “Tissue” sources (i.e. columns 2 and 3) having the prefix “a_” indicates organs, tissues, or cells derived from “adult” sources. Codes corresponding to diseased tissues are indicated in column 6 with the word “disease.” The use of the word “disease” in column 6 is non-limiting. The tissue or cell source may be specific (e.g. a neoplasm), or may be disease-associated (e.g., a tissue sample from a normal portion of a diseased organ). Furthermore, tissues and/or cells lacking the “disease” designation may still be derived from sources directly or indirectly involved in a disease state or disorder, and therefore may have a further utility in that disease state or disorder. In numerous cases where the tissue/cell source is a library, column 7 identifies the vector used to generate the library.

[0058] Description of Table 5

[0059] Table 5 provides a key to the OMIM reference identification numbers disclosed in Table 1B.1, column 9. OMIM reference identification numbers (Column 1) were derived from Online Mendelian Inheritance in Man (Online Mendelian Inheritance in Man, OMIM. McKusick-Nathans Institute for Genetic Medicine, Johns Hopkins University (Baltimore, Md.) and National Center for Biotechnology Information, National Library of Medicine, (Bethesda, Md.) 2000. World Wide Web URL: http://www.ncbi.nlm.nih.gov/omim/). Column 2 provides diseases associated with the cytologic band disclosed in Table 1B.1, column 8, as determined using the Morbid Map database.

[0060] Description of Table 6

[0061] Table 6 summarizes some of the ATCC Deposits, Deposit dates, and ATCC designation numbers of deposits made with the ATCC in connection with the present application. These deposits were made in addition to those described in the Table 1A.

[0062] Description of Table 7

[0063] Table 7 shows the cDNA libraries sequenced, and ATCC designation numbers and vector information relating to these cDNA libraries.

[0064] The first column shows the first four letters indicating the Library from which each library clone was derived. The second column indicates the catalogued tissue description for the corresponding libraries. The third column indicates the vector containing the corresponding clones. The fourth column shows the ATCC deposit designation for each libray clone as indicated by the deposit information in Table 6.

[0065] Definitions

[0066] The following definitions are provided to facilitate understanding of certain terms used throughout this specification.

[0067] In the present invention, “isolated” refers to material removed from its original environment (e.g., the natural environment if it is naturally occurring), and thus is altered “by the hand of man” from its natural state. For example, an isolated polynucleotide could be part of a vector or a composition of matter, or could be contained within a cell, and still be “isolated” because that vector, composition of matter, or particular cell is not the original environment of the polynucleotide. The term “isolated” does not refer to genomic or cDNA libraries, whole cell total or mRNA preparations, genomic DNA preparations (including those separated by electrophoresis and transferred onto blots), sheared whole cell genomic DNA preparations or other compositions where the art demonstrates no distinguishing features of the polynucleotide/sequences of the present invention.

[0068] In the present invention, a “secreted” protein refers to those proteins capable of being directed to the ER, secretory vesicles, or the extracellular space as a result of a signal sequence, as well as those proteins released into the extracellular space without necessarily containing a signal sequence. If the secreted protein is released into the extracellular space, the secreted protein can undergo extracellular processing to produce a “mature” protein. Release into the extracellular space can occur by many mechanisms, including exocytosis and proteolytic cleavage.

[0069] As used herein, a “polynucleotide” refers to a molecule having a nucleic acid sequence encoding SEQ ID NO:Y or a fragment or variant thereof (e.g., the polypeptide delinated in columns fourteen and fifteen of Table 1A); a nucleic acid sequence contained in SEQ ID NO:X (as described in column 5 of Table 1A and/or column 3 of Table 1B) or the complement thereof; a cDNA sequence contained in Clone ID: (as described in column 2 of Table 1A and/or Table 1B and contained within a library deposited with the ATCC); a nucleotide sequence encoding the polypeptide encoded by a nucleotide sequence in SEQ ID NO:B as defined in column 6 (EXON From-To) of Table 1C or a fragment or variant thereof, or a nucleotide coding sequence in SEQ ID NO:B as defined in column 6 of Table 1C or the complement thereof. For example, the polynucleotide can contain the nucleotide sequence of the full length cDNA sequence, including the 5′ and 3′ untranslated sequences, the coding region, as well as fragments, epitopes, domains, and variants of the nucleic acid sequence. Moreover, as used herein, a “polypeptide” refers to a molecule having an amino acid sequence encoded by a polynucleotide of the invention as broadly defined (obviously excluding poly-Phenylalanine or poly-Lysine peptide sequences which result from translation of a polyA tail of a sequence corresponding to a cDNA).

[0070] In the present invention, “SEQ ID NO:X” was often generated by overlapping sequences contained in multiple clones (contig analysis). A representative clone containing all or most of the sequence for SEQ ID NO:X is deposited at Human Genome Sciences, Inc. (HGS) in a catalogued and archived library. As shown, for example, in column 2 of Table 1B, each clone is identified by a cDNA Clone ID (identifier generally referred to herein as Clone ID:). Each Clone ID is unique to an individual clone and the Clone ID is all the information needed to retrieve a given clone from the HGS library. Table 7 provides a list of the deposited cDNA libraries. One can use the Clone ID: to determine the library source by reference to Tables 6 and 7. Table 7 lists the deposited cDNA libraries by name and links each library to an ATCC Deposit. Library names contain four characters, for example, “HTWE.” The name of a cDNA clone (Clone ID) isolated from that library begins with the same four characters, for example “HTWEP07”. As mentioned below, Table 1A and/or Table 1B correlates the Clone ID names with SEQ ID NO:X. Thus, starting with an SEQ ID NO:X, one can use Tables 1A, 1B, 6, 7, and 9 to determine the corresponding Clone ID, which library it came from and which ATCC deposit the library is contained in. Furthermore, it is possible to retrieve a given cDNA clone from the source library by techniques known in the art and described elsewhere herein. The ATCC is located at 10801 University Boulevard, Manassas, Va. 20110-2209, USA. The ATCC deposits were made pursuant to the terms of the Budapest Treaty on the international recognition of the deposit of microorganisms for the purposes of patent procedure.

[0071] In specific embodiments, the polynucleotides of the invention are at least 15, at least 30, at least 50, at least 100, at least 125, at least 500, or at least 1000 continuous nucleotides but are less than or equal to 300 kb, 200 kb, 100 kb, 50 kb, 15 kb, 10 kb, 7.5 kb, 5 kb, 2.5 kb, 2.0 kb, or 1 kb, in length. In a further embodiment, polynucleotides of the invention comprise a portion of the coding sequences, as disclosed herein, but do not comprise all or a portion of any intron. In another embodiment, the polynucleotides comprising coding sequences do not contain coding sequences of a genomic flanking gene (i.e., 5′ or 3′ to the gene of interest in the genome). In other embodiments, the polynucleotides of the invention do not contain the coding sequence of more than 1000, 500, 250, 100, 50, 25, 20, 15, 10, 5, 4, 3, 2, or 1 genomic flanking gene(s).

[0072] A “polynucleotide” of the present invention also includes those polynucleotides capable of hybridizing, under stringent hybridization conditions, to sequences contained in SEQ ID NO:X, or the complement thereof (e.g., the complement of any one, two, three, four, or more of the polynucleotide fragments described herein), the polynucleotide sequence delineated in columns 7 and 8 of Table 1A or the complement thereof, the polynucleotide sequence delineated in columns 8 and 9 of Table 2 or the complement thereof, and/or cDNA sequences contained in Clone ID: (e.g., the complement of any one, two, three, four, or more of the polynucleotide fragments, or the cDNA clone within the pool of cDNA clones deposited with the ATCC, described herein), and/or the polynucleotide sequence delineated in column 6 of Table 1C or the complement thereof. “Stringent hybridization conditions” refers to an overnight incubation at 42 degree C. in a solution comprising 50% formamide, 5×SSC (750 mM NaCl, 75 mM trisodium citrate), 50 mM sodium phosphate (pH 7.6), 5× Denhardt's solution, 10% dextran sulfate, and 20 μg/ml denatured, sheared salmon sperm DNA, followed by washing the filters in 0.1×SSC at about 65 degree C.

[0073] Also contemplated are nucleic acid molecules that hybridize to the polynucleotides of the present invention at lower stringency hybridization conditions. Changes in the stringency of hybridization and signal detection are primarily accomplished through the manipulation of formamide concentration (lower percentages of formamide result in lowered stringency); salt conditions, or temperature. For example, lower stringency conditions include an overnight incubation at 37 degree C. in a solution comprising 6×SSPE (20×SSPE=3M NaCl; 0.2M NaH₂PO₄; 0.02M EDTA, pH 7.4), 0.5% SDS, 30% formamide, 100 ug/ml salmon sperm blocking DNA; followed by washes at 50 degree C. with 1×SSPE, 0.1% SDS. In addition, to achieve even lower stringency, washes performed following stringent hybridization can be done at higher salt concentrations (e.g. 5×SSC).

[0074] Note that variations in the above conditions may be accomplished through the inclusion and/or substitution of alternate blocking reagents used to suppress background in hybridization experiments. Typical blocking reagents include Denhardt's reagent, BLOTTO, heparin, denatured salmon sperm DNA, and commercially available proprietary formulations. The inclusion of specific blocking reagents may require modification of the hybridization conditions described above, due to problems with compatibility.

[0075] Of course, a polynucleotide which hybridizes only to polyA+ sequences (such as any 3′ terminal polyA+ tract of a cDNA shown in the sequence listing), or to a complementary stretch of T (or U) residues, would not be included in the definition of “polynucleotide,” since such a polynucleotide would hybridize to any nucleic acid molecule containing a poly (A) stretch or the complement thereof (e.g., practically any double-stranded cDNA clone generated using oligo dT as a primer).

[0076] The polynucleotide of the present invention can be composed of any polyribonucleotide or polydeoxribonucleotide, which may be unmodified RNA or DNA or modified RNA or DNA. For example, polynucleotides can be composed of single- and double-stranded DNA, DNA that is a mixture of single- and double-stranded regions, single- and double-stranded RNA, and RNA that is mixture of single- and double-stranded regions, hybrid molecules comprising DNA and RNA that may be single-stranded or, more typically, double-stranded or a mixture of single- and double-stranded regions. In addition, the polynucleotide can be composed of triple-stranded regions comprising RNA or DNA or both RNA and DNA. A polynucleotide may also contain one or more modified bases or DNA or RNA backbones modified for stability or for other reasons. “Modified” bases include, for example, tritylated bases and unusual bases such as inosine. A variety of modifications can be made to DNA and RNA; thus, “polynucleotide” embraces chemically, enzymatically, or metabolically modified forms.

[0077] In specific embodiments, the polynucleotides of the invention are at least 15, at least 30, at least 50, at least 100, at least 125, at least 500, or at least 1000 continuous nucleotides but are less than or equal to 300 kb, 200 kb, 100 kb, 50 kb, 15 kb, 10 kb, 7.5 kb, 5 kb, 2.5 kb, 2.0 kb, or 1 kb, in length. In a further embodiment, polynucleotides of the invention comprise a portion of the coding sequences, as disclosed herein, but do not comprise all or a portion of any intron. In another embodiment, the polynucleotides comprising coding sequences do not contain coding sequences of a genomic flanking gene (i.e., 5′ or 3′ to the gene of interest in the genome). In other embodiments, the polynucleotides of the invention do not contain the coding sequence of more than 1000, 500, 250, 100, 50, 25, 20, 15, 10, 5, 4, 3, 2, or 1 genomic flanking gene(s).

[0078] “SEQ ID NO:X” refers to a polynucleotide sequence described in column 5 of Table 1A, while “SEQ ID NO:Y” refers to a polypeptide sequence described in column 10 of Table 1A. SEQ ID NO:X is identified by an integer specified in column 6 of Table 1A. The polypeptide sequence SEQ ID NO:Y is a translated open reading frame (ORF) encoded by polynucleotide SEQ ID NO:X. The polynucleotide sequences are shown in the sequence listing immediately followed by all of the polypeptide sequences. Thus, a polypeptide sequence corresponding to polynucleotide sequence SEQ ID NO:2 is the first polypeptide sequence shown in the sequence listing. The second polypeptide sequence corresponds to the polynucleotide sequence shown as SEQ ID NO:3, and so on.

[0079] The polypeptide of the present invention can be composed of amino acids joined to each other by peptide bonds or modified peptide bonds, i.e., peptide isosteres, and may contain amino acids other than the 20 gene-encoded amino acids. The polypeptides may be modified by either natural processes, such as posttranslational processing, or by chemical modification techniques which are well known in the art. Such modifications are well described in basic texts and in more detailed monographs, as well as in a voluminous research literature. Modifications can occur anywhere in a polypeptide, including the peptide backbone, the amino acid side-chains and the amino or carboxyl termini. It will be appreciated that the same type of modification may be present in the same or varying degrees at several sites in a given polypeptide. Also, a given polypeptide may contain many types of modifications. Polypeptides may be branched, for example, as a result of ubiquitination, and they may be cyclic, with or without branching. Cyclic, branched, and branched cyclic polypeptides may result from posttranslation natural processes or may be made by synthetic methods. Modifications include acetylation, acylation, ADP-ribosylation, amidation, covalent attachment of flavin, covalent attachment of a heme moiety, covalent attachment of a nucleotide or nucleotide derivative, covalent attachment of a lipid or lipid derivative, covalent attachment of phosphotidylinositol, cross-linking, cyclization, disulfide bond formation, demethylation, formation of covalent cross-links, formation of cysteine, formation of pyroglutamate, formylation, gamma-carboxylation, glycosylation, GPI anchor formation, hydroxylation, iodination, methylation, myristoylation, oxidation, pegylation, proteolytic processing, phosphorylation, prenylation, racemization, selenoylation, sulfation, transfer-RNA mediated addition of amino acids to proteins such as arginylation, and ubiquitination. (See, for instance, PROTEINS—STRUCTURE AND MOLECULAR PROPERTIES, 2nd Ed., T.E. Creighton, W.H. Freeman and Company, New York (1993); POSTTRANSLATIONAL COVALENT MODIFICATION OF PROTEINS, B. C. Johnson, Ed., Academic Press, New York, pgs. 1-12 (1983); Seifter et al., Meth. Enzymol. 182:626-646 (1990); Rattan et al., Ann. N.Y. Acad. Sci. 663:48-62 (1992)).

[0080] “SEQ ID NO:X” refers to a polynucleotide sequence described, for example, in Tables 1A, Table 1B, or Table 2, while “SEQ ID NO:Y” refers to a polypeptide sequence described in column 11 of Table 1A and or of Table 1B. SEQ ID NO:X is identified by an integer specified in column 4 of Table 1B. The polypeptide sequence SEQ ID NO:Y is a translated open reading frame (ORF) encoded by polynucleotide SEQ ID NO:X. “Clone ID:” refers to a cDNA clone described in column 2 of Table 1A and/or 1B.

[0081] “A polypeptide having functional activity” refers to a polypeptide capable of displaying one or more known functional activities associated with a full-length (complete) protein. Such functional activities include, but are not limited to, biological activity (e.g. activity useful in treating, preventing and/or ameliorating diabetes mellitus), antigenicity (ability to bind [or compete with a polypeptide for binding] to an anti-polypeptide antibody), immunogenicity (ability to generate antibody which binds to a specific polypeptide of the invention), ability to form multimers with polypeptides of the invention, and ability to bind to a receptor or ligand for a polypeptide.

[0082] The polypeptides of the invention can be assayed for functional activity (e.g. biological activity) using or routinely modifying assays known in the art, as well as assays described herein. Specifically, one of skill in the art may routinely assay secreted polypeptides (including fragments and variants) of the invention for activity using assays as described in the examples section below.

[0083] “A polypeptide having biological activity” refers to a polypeptide exhibiting activity similar to, but not necessarily identical to, an activity of a polypeptide of the present invention, including mature forms, as measured in a particular biological assay, with or without dose dependency. In the case where dose dependency does exist, it need not be identical to that of the polypeptide, but rather substantially similar to the dose-dependence in a given activity as compared to the polypeptide of the present invention (i.e., the candidate polypeptide will exhibit greater activity or not more than about 25-fold less and, preferably, not more than about tenfold less activity, and most preferably, not more than about three-fold less activity relative to the polypeptide of the present invention).

Tables

[0084] Table 1A

[0085] Table 1A summarizes information concerning certain polypnucleotides and polypeptides of the invention. The first column provides the gene number in the application for each clone identifier. The second column provides a unique clone identifier, “Clone ID:”, for a cDNA clone related to each contig sequence disclosed in Table 1A. Third column, the cDNA Clones identified in the second column were deposited as indicated in the third column (i.e. by ATCC Deposit No:Z and deposit date). Some of the deposits contain multiple different clones corresponding to the same gene. In the fourth column, “Vector” refers to the type of vector contained in the corresponding cDNA Clone identified in the second column. In the fifth column, the nucleotide sequence identified as “NT SEQ ID NO:X” was assembled from partially homologous (“overlapping”) sequences obtained from the corresponding cDNA clone identified in the second column and, in some cases, from additional related cDNA clones. The overlapping sequences were assembled into a single contiguous sequence of high redundancy (usually three to five overlapping sequences at each nucleotide position), resulting in a final sequence identified as SEQ ID NO:X. In the sixth column, “Total NT Seq.” refers to the total number of nucleotides in the contig sequence identified as SEQ ID NO:X.” The deposited clone may contain all or most of these sequences, reflected by the nucleotide position indicated as “5′ NT of Clone Seq.” (seventh column) and the “3′ NT of Clone Seq.” (eighth column) of SEQ ID NO:X. In the ninth column, the nucleotide position of SEQ ID NO:X of the putative start codon (methionine) is identified as “5′ NT of Start Codon.” Similarly, in column ten, the nucleotide position of SEQ ID NO:X of the predicted signal sequence is identified as “5′ NT of First AA of Signal Pep.” In the eleventh column, the translated amino acid sequence, beginning with the methionine, is identified as “AA SEQ ID NO:Y,” although other reading frames can also be routinely translated using known molecular biology techniques. The polypeptides produced by these alternative open reading frames are specifically contemplated by the present invention.

[0086] In the twelfth and thirteenth columns of Table 1A, the first and last amino acid position of SEQ ID NO:Y of the predicted signal peptide is identified as “First AA of Sig Pep” and “Last AA of Sig Pep.” In the fourteenth column, the predicted first amino acid position of SEQ ID NO:Y of the secreted portion is identified as “Predicted First AA of Secreted Portion”. The amino acid position of SEQ ID NO:Y of the last amino acid encoded by the open reading frame is identified in the fifteenth column as “Last AA of ORF”.

[0087] SEQ ID NO:X (where X may be any of the polynucleotide sequences disclosed in the sequence listing) and the translated SEQ ID NO:Y (where Y may be any of the polypeptide sequences disclosed in the sequence listing) are sufficiently accurate and otherwise suitable for a variety of uses well known in the art and described further below. For instance, SEQ ID NO:X is useful for designing nucleic acid hybridization probes that will detect nucleic acid sequences contained in SEQ ID NO:X or the cDNA contained in the deposited clone. These probes will also hybridize to nucleic acid molecules in biological samples, thereby enabling a variety of forensic and diagnostic methods of the invention. Similarly, polypeptides identified from SEQ ID NO:Y may be used, for example, to generate antibodies which bind specifically to proteins containing the polypeptides and the secreted proteins encoded by the cDNA clones identified in Table 1A and/or elsewhere herein

[0088] Nevertheless, DNA sequences generated by sequencing reactions can contain sequencing errors. The errors exist as misidentified nucleotides, or as insertions or deletions of nucleotides in the generated DNA sequence. The erroneously inserted or deleted nucleotides cause frame shifts in the reading frames of the predicted amino acid sequence. In these cases, the predicted amino acid sequence diverges from the actual amino acid sequence, even though the generated DNA sequence may be greater than 99.9% identical to the actual DNA sequence (for example, one base insertion or deletion in an open reading frame of over 1000 bases).

[0089] Accordingly, for those applications requiring precision in the nucleotide sequence or the amino acid sequence, the present invention provides not only the generated nucleotide sequence identified as SEQ ID NO:X, and the predicted translated amino acid sequence identified as SEQ ID NO:Y, but also a sample of plasmid DNA containing a human cDNA of the invention deposited with the ATCC, as set forth in Table 1A. The nucleotide sequence of each deposited plasmid can readily be determined by sequencing the deposited plasmid in accordance with known methods

[0090] The predicted amino acid sequence can then be verified from such deposits. Moreover, the amino acid sequence of the protein encoded by a particular plasmid can also be directly determined by peptide sequencing or by expressing the protein in a suitable host cell containing the deposited human cDNA, collecting the protein, and determining its sequence.

[0091] Also provided in Table 1A is the name of the vector which contains the cDNA plasmid. Each vector is routinely used in the art. The following additional information is provided for convenience.

[0092] Vectors Lambda Zap (U.S. Pat. Nos. 5,128,256 and 5,286,636), Uni-Zap XR (U.S. Pat. Nos. 5,128,256 and 5,286,636), Zap Express (U.S. Pat. Nos. 5,128,256 and 5,286,636), pBluescript (pBS) (Short, J. M. et al., Nucleic Acids Res. 16:7583-7600 (1988); Alting-Mees, M. A. and Short, J. M., Nucleic Acids Res. 17:9494 (1989)) and pBK (Alting-Mees, M. A. et al., Strategies 5:58-61 (1992)) are commercially available from Stratagene Cloning Systems, Inc., 11011 N. Torrey Pines Road, La Jolla, Calif., 92037. pBS contains an ampicillin resistance gene and pBK contains a neomycin resistance gene. Phagemid pBS may be excised from the Lambda Zap and Uni-Zap XR vectors, and phagemid pBK may be excised from the Zap Express vector. Both phagemids may be transformed into E. coli strain XL-1 Blue, also available from Stratagene Vectors pSport1, pCMVSport 1.0, pCMVSport 2.0 and pCMVSport 3.0, were obtained from Life Technologies, Inc., P.O. Box 6009, Gaithersburg, Md. 20897. All Sport vectors contain an ampicillin resistance gene and may be transformed into E. coli strain DH10B, also available from Life Technologies. See, for instance, Gruber, C. E., et al., Focus 15:59 (1993). Vector lafmid BA (Bento Soares, Columbia University, New York, N.Y.) contains an ampicillin resistance gene and can be transformed into E. coli strain XL-1 Blue. Vector pCR®2.1, which is available from Invitrogen, 1600 Faraday Avenue, Carlsbad, Calif. 92008, contains an ampicillin resistance gene and may be transformed into E. coli strain DH10B, available from Life Technologies. See, for instance, Clark, J. M., Nuc. Acids Res. 16:9677-9686 (1988) and Mead, D. et al., Bio/Technology 9: (1991).

[0093] The present invention also relates to the genes corresponding to SEQ ID NO:X, SEQ ID NO:Y, and/or a deposited cDNA (cDNA Clone ID). The corresponding gene can be isolated in accordance with known methods using the sequence information disclosed herein. Such methods include, but are not limited to, preparing probes or primers from the disclosed sequence and identifying or amplifying the corresponding gene from appropriate sources of genomic material.

[0094] Also provided in the present invention are allelic variants, orthologs, and/or species homologs. Procedures known in the art can be used to obtain full-length genes, allelic variants, splice variants, full-length coding portions, orthologs, and/or species homologs of genes corresponding to SEQ ID NO:X and SEQ ID NO:Y using information from the sequences disclosed herein or the clones deposited with the ATCC. For example, allelic variants and/or species homologs may be isolated and identified by making suitable probes or primers from the sequences provided herein and screening a suitable nucleic acid source for allelic variants and/or the desired homologue.

[0095] The present invention provides a polynucleotide comprising, or alternatively consisting of, the nucleic acid sequence of SEQ ID NO:X and/or a cDNA contained in ATCC Deposit No. Z. The present invention also provides a polypeptide comprising, or alternatively, consisting of, the polypeptide sequence of SEQ ID NO:Y, a polypeptide encoded by SEQ ID NO:X, and/or a polypeptide encoded by a cDNA contained in ATCC deposit No. Z. Polynucleotides encoding a polypeptide comprising, or alternatively consisting of the polypeptide sequence of SEQ ID NO:Y, a polypeptide encoded by SEQ ID NO:X and/or a polypeptide encoded by the cDNA contained in ATCC Deposit No. Z, are also encompassed by the invention. The present invention further encompasses a polynucleotide comprising, or alternatively consisting of the complement of the nucleic acid sequence of SEQ ID NO:X, and/or the complement of the coding strand of the cDNA contained in ATCC Deposit No. Z.

TABLE 1A

| | | | | | | | | | 5′ NT | | First | Last | | |
|---|---|---|---|---|---|---|---|---|---|---|---|---|---|---|
| | | ATCC | | NT | | 5′ NT | 3′ NT | | of First | AA | AA | AA | First AA | Last |
| | | Deposit | | SEQ | | of | of | 5′ NT | AA of | SEQ | of | of | of | AA |
| Gene | cDNA | No: Z and | | ID | Total | Clone | Clone | of Start | Signal | ID | Sig | Sig | Secreted | of |
| No. | Clone ID | Date | Vector | NO: X | NT Seq. | Seq. | Seq. | Codon | Pep | NO: Y | Pep | Pep | Portion | ORF |
| 1 | H2CBU83 | 209889 | pBluescript | 11 | 2703 | 1 | 2703 | 157 | 157 | 395 | 1 | 30 | 31 | 207 |
| | | May 22, 1998 | SK− | | | | | | | | | | | |
| 1 | H2CBU83 | 209889 | pBluescript | 259 | 2709 | 1 | 2709 | 157 | 157 | 643 | 1 | 30 | 31 | 51 |
| | | May 22, 1998 | SK− | | | | | | | | | | | |
| 2 | H6EDC19 | 209324 | Uni-ZAP | 12 | 760 | 324 | 760 | 389 | 389 | 396 | 1 | 25 | 26 | 114 |
| | | Oct. 02, 1997 | XR | | | | | | | | | | | |
| 3 | HACBD91 | 209626 | Uni-ZAP | 13 | 1445 | 1 | 1445 | 117 | 117 | 397 | 1 | 42 | 43 | 49 |
| | | Feb. 12, 1998 | XR | | | | | | | | | | | |
| 4 | HACCI17 | 203071 | Uni-ZAP | 14 | 1722 | 336 | 1714 | 461 | 461 | 398 | 1 | 24 | 25 | 218 |
| | | Jul. 27, 1998 | XR | | | | | | | | | | | |
| 4 | HACCI17 | 203071 | Uni-ZAP | 260 | 1380 | 12 | 1380 | 135 | 135 | 644 | 1 | 24 | 25 | 72 |
| | | Jul. 27, 1998 | XR | | | | | | | | | | | |
| 5 | HAGAQ26 | 209368 | Uni-ZAP | 15 | 1333 | 157 | 1333 | 251 | 251 | 399 | 1 | 20 | 21 | 62 |
| | | Oct. 16, 1997 | XR | | | | | | | | | | | |
| 6 | HAGDS35 | 209299 | Uni-ZAP | 16 | 751 | 1 | 751 | 45 | 45 | 400 | 1 | 23 | 24 | 122 |
| | | Sep. 25, 1997 | XR | | | | | | | | | | | |
| 6 | HAGDS35 | 209299 | Uni-ZAP | 261 | 813 | 1 | 813 | 52 | 52 | 645 | 1 | 23 | 24 | 118 |
| | | Sep. 25, 1997 | XR | | | | | | | | | | | |
| 7 | HAGFI62 | 209782 | Uni-ZAP | 17 | 1003 | 368 | 992 | 429 | 429 | 401 | 1 | 28 | 29 | 91 |
| | | Apr. 20, 1998 | XR | | | | | | | | | | | |
| 8 | HAHDB16 | 209626 | Uni-ZAP | 18 | 796 | 1 | 796 | 93 | 93 | 402 | 1 | 20 | 21 | 50 |
| | | Feb. 12, 1998 | XR | | | | | | | | | | | |
| 9 | HAICP19 | 209009 | Uni-ZAP | 19 | 1624 | 89 | 1483 | 128 | 128 | 403 | 1 | 18 | 19 | 446 |
| | | Apr. 28, 1997 | XR | | | | | | | | | | | |
| 10 | HAIFL18 | 209852 | Uni-ZAP | 20 | 879 | 1 | 879 | 274 | 274 | 404 | 1 | 29 | 30 | 140 |
| | | May 07, 1998 | XR | | | | | | | | | | | |
| 11 | HAJAN23 | PTA-322 | pCMVSport | 21 | 2849 | 1 | 2849 | 109 | 109 | 405 | 1 | 15 | 16 | 563 |
| | | Jul. 09, 1999 | 3.0 | | | | | | | | | | | |
| 11 | HAJAN23 | PTA-322 | pCMVSport | 262 | 2288 | 1 | 2288 | 120 | 120 | 646 | 1 | 15 | 16 | 169 |
| | | Jul. 09, 1999 | 3.0 | | | | | | | | | | | |
| 12 | HAJBR69 | 209626 | pCMVSport | 22 | 755 | 1 | 755 | 262 | 262 | 406 | 1 | 19 | 20 | 53 |
| | | Feb. 12, 1998 | 3.0 | | | | | | | | | | | |
| 13 | HAMFE15 | 203364 | pCMVSport | 23 | 4129 | 1 | 4129 | 1495 | 1495 | 407 | 1 | 34 | 35 | 421 |
| | | Oct. 19, 1998 | 3.0 | | | | | | | | | | | |
| 13 | HAMFE15 | 203364 | pCMVSport | 263 | 3758 | 1 | 3758 | 226 | 226 | 647 | 1 | 23 | 24 | 47 |
| | | Oct. 19, 1998 | 3.0 | | | | | | | | | | | |
| 14 | HAMGR28 | 209965 | pCMVSport | 24 | 1674 | 47 | 1674 | 98 | 98 | 408 | 1 | 18 | 19 | 242 |
| | | Jun. 11, 1998 | 3.0 | | | | | | | | | | | |
| 14 | HAMGR28 | 209965 | pCMVSport | 264 | 1534 | 1 | 1534 | 40 | 40 | 648 | 1 | 18 | 19 | 203 |
| | | Jun. 11, 1998 | 3.0 | | | | | | | | | | | |
| 15 | HAPBS03 | 209651 | Uni-ZAP | 25 | 1503 | 45 | 1479 | 252 | 252 | 409 | 1 | 28 | 29 | 41 |
| | | Mar. 04, 1998 | XR | | | | | | | | | | | |
| 16 | HAPNY94 | 209889 | Uni-ZAP | 26 | 742 | 1 | 742 | 94 | 94 | 410 | 1 | 29 | 30 | 50 |
| | | May 22, 1998 | XR | | | | | | | | | | | |
| 17 | HAPOM49 | 209878 | Uni-ZAP | 27 | 2005 | 1 | 2005 | 251 | 251 | 411 | 1 | 22 | 23 | 189 |
| | | May 18, 1998 | XR | | | | | | | | | | | |
| 17 | HAPOM49 | 209878 | Uni-ZAP | 265 | 2664 | 1 | 2664 | 448 | 448 | 649 | 1 | 1 | 2 | 123 |
| | | May 18, 1998 | XR | | | | | | | | | | | |
| 18 | HAPUC89 | 203570 | Uni-ZAP | 28 | 1153 | 1 | 1153 | 385 | 385 | 412 | 1 | 25 | 26 | 140 |
| | | Jan. 11, 1999 | XR | | | | | | | | | | | |
| 19 | HATBR65 | 209626 | Uni-ZAP | 29 | 812 | 1 | 812 | 252 | 252 | 413 | 1 | 16 | 17 | 64 |
| | | Feb. 12, 1998 | XR | | | | | | | | | | | |
| 20 | HAUAI83 | 209626 | Uni-ZAP | 30 | 910 | 1 | 886 | 253 | 253 | 414 | 1 | 18 | 19 | 49 |
| | | Feb. 12, 1998 | XR | | | | | | | | | | | |
| 20 | HAUAI83 | 209626 | Uni-ZAP | 266 | 1076 | 1 | 1076 | | 575 | 650 | 1 | 10 | 11 | 23 |
| | | Feb. 12, 1998 | XR | | | | | | | | | | | |
| 21 | HBAMB15 | 209683 | pSport1 | 31 | 821 | 330 | 821 | 390 | 390 | 415 | 1 | 19 | 20 | 59 |
| | | Mar. 20, 1998 | | | | | | | | | | | | |
| 22 | HBGBA69 | 209878 | Uni-ZAP | 32 | 981 | 1 | 981 | 124 | 124 | 416 | 1 | 38 | 39 | 240 |
| | | May 18, 1998 | XR | | | | | | | | | | | |
| 22 | HBGBA69 | 209878 | Uni-ZAP | 267 | 943 | 1 | 933 | 62 | 62 | 651 | 1 | 38 | 39 | 60 |
| | | May 18, 1998 | XR | | | | | | | | | | | |
| 23 | HBGNU56 | PTA-2073 | Uni-ZAP | 33 | 864 | 1 | 864 | 125 | 125 | 417 | 1 | 21 | 22 | 185 |
| | | Jun. 09, 2000 | XR | | | | | | | | | | | |
| 23 | HBGNU56 | PTA-2073 | Uni-ZAP | 268 | 941 | 1 | 941 | 79 | 79 | 652 | 1 | 21 | 22 | 178 |
| | | Jun. 09, 2000 | XR | | | | | | | | | | | |
| 23 | HBGNU56 | PTA-2073 | Uni-ZAP | 269 | 988 | 804 | 853 | | 2 | 653 | 1 | 1 | 2 | 219 |
| | | Jun. 09, 2000 | XR | | | | | | | | | | | |
| 24 | HBIAE26 | 209224 | Uni-ZAP | 34 | 1038 | 1 | 1038 | 75 | 75 | 418 | 1 | 18 | 19 | 39 |
| | | Aug. 28, 1997 | XR | | | | | | | | | | | |
| 25 | HBINS58 | PTA-885 | pCMVSport | 35 | 843 | 1 | 843 | 57 | 57 | 419 | 1 | 30 | 31 | 174 |
| | | Oct. 28, 1999 | 3.0 | | | | | | | | | | | |
| 25 | HBINS58 | PTA-885 | pCMVSport | 270 | 1566 | 1 | 1566 | 71 | 71 | 654 | 1 | 29 | 30 | 173 |
| | | Oct. 28, 1999 | 3.0 | | | | | | | | | | | |
| 25 | HBINS58 | PTA-885 | pCMVSport | 271 | 1067 | 1 | 1067 | 100 | 100 | 655 | 1 | 29 | 30 | 210 |
| | | Oct. 28, 1999 | 3.0 | | | | | | | | | | | |
| 26 | HBJFU48 | 209125 | Uni-ZAP | 36 | 849 | 1 | 849 | 20 | 20 | 420 | 1 | 39 | 40 | 40 |
| | | Jun. 19, 1997 | XR | | | | | | | | | | | |
| 27 | HBJLC01 | 209651 | Uni-ZAP | 37 | 872 | 1 | 872 | 87 | 87 | 421 | 1 | 34 | 35 | 46 |
| | | Mar. 04, 1998 | XR | | | | | | | | | | | |
| 28 | HBNAW17 | 209242 | Uni-ZAP | 38 | 601 | 1 | 601 | 77 | 77 | 422 | 1 | 37 | 38 | 61 |
| | | Sep. 12, 1997 | XR | | | | | | | | | | | |
| 29 | HCE2F54 | 209626 | Uni-ZAP | 39 | 1276 | 19 | 1256 | 166 | 166 | 423 | 1 | 19 | 20 | 319 |
| | | Feb. 12, 1998 | XR | | | | | | | | | | | |
| 30 | HCE3G69 | 209878 | Uni-ZAP | 40 | 2084 | 1 | 2084 | 165 | 165 | 424 | 1 | 19 | 20 | 336 |
| | | May 18, 1998 | XR | | | | | | | | | | | |
| 30 | HCE3G69 | 209878 | Uni-ZAP | 272 | 2078 | 1 | 2078 | 165 | 165 | 656 | 1 | 19 | 20 | 105 |
| | | May 18, 1998 | XR | | | | | | | | | | | |
| 31 | HCE5F43 | 209580 | Uni-ZAP | 41 | 1765 | 1 | 1765 | 113 | 113 | 425 | 1 | 20 | 21 | 272 |
| | | Jan. 14, 1998 | XR | | | | | | | | | | | |
| 32 | HCEFB80 | PTA-2069 | Uni-ZAP | 42 | 2494 | 1 | 2494 | 12 | 12 | 426 | 1 | 35 | 36 | 89 |
| | | Jun. 09, 2000 | XR | | | | | | | | | | | |
| 32 | HCEFB80 | PTA-2069 | Uni-ZAP | 273 | 2494 | 1 | 2451 | 5 | 5 | 657 | 1 | 35 | 36 | 89 |
| | | Jun. 09, 2000 | XR | | | | | | | | | | | |
| 33 | HCENK38 | 209651 | Uni-ZAP | 43 | 1509 | 1 | 1509 | 10 | 10 | 427 | 1 | 28 | 29 | 52 |
| | | Mar. 04, 1998 | XR | | | | | | | | | | | |
| 34 | HCEWE20 | 209300 | Uni-ZAP | 44 | 885 | 13 | 885 | 166 | 166 | 428 | 1 | 18 | 19 | 51 |
| | | Sep. 25, 1997 | XR | | | | | | | | | | | |
| 35 | HCFOM18 | 209324 | pSport1 | 45 | 639 | 1 | 639 | 28 | 28 | 429 | 1 | 20 | 21 | 63 |
| | | Oct. 02, 1997 | | | | | | | | | | | | |
| 36 | HCGMD59 | 209627 | pCMVSport | 46 | 790 | 1 | 780 | 438 | 438 | 430 | 1 | 30 | 31 | 74 |
| | | Feb. 12, 1998 | 2.0 | | | | | | | | | | | |
| 37 | HCNDR47 | PTA-855 | Lambda | 47 | 1343 | 1 | 1343 | 21 | 21 | 431 | 1 | 24 | 25 | 127 |
| | | Oct. 18, 1999 | ZAP II | | | | | | | | | | | |
| 37 | HCNDR47 | PTA-855 | Lambda | 274 | 845 | 1 | 845 | 124 | 124 | 658 | 1 | 47 | 48 | 127 |
| | | Oct. 18, 1999 | ZAP II | | | | | | | | | | | |
| 37 | HCNDR47 | PTA-855 | Lambda | 275 | 738 | 1 | 738 | | 603 | 659 | 1 | 8 | 9 | 9 |
| | | Oct. 18, 1999 | ZAP II | | | | | | | | | | | |
| 38 | HCNSB61 | 209242 | pBluescript | 48 | 712 | 1 | 712 | 218 | 218 | 432 | 1 | 21 | 22 | 43 |
| | | Sep. 12, 1997 | | | | | | | | | | | | |
| 39 | HCQCT05 | PTA-884 | Lambda | 49 | 679 | 1 | 679 | | 381 | 433 | 1 | | | 2 |
| | | Oct. 28, 1999 | ZAP II | | | | | | | | | | | |
| 39 | HCQCT05 | PTA-884 | Lambda | 276 | 2333 | 1324 | 2333 | | 1702 | 660 | 1 | | | 2 |
| | | Oct. 28, 1999 | ZAP II | | | | | | | | | | | |
| 40 | HCUGM86 | PTA-1544 | ZAP Express | 50 | 627 | 1 | 627 | 91 | 91 | 434 | 1 | 24 | 25 | 44 |
| | | Mar. 21, 2000 | | | | | | | | | | | | |
| 41 | HCUIM65 | 209324 | ZAP Express | 51 | 875 | 331 | 736 | 557 | 557 | 435 | 1 | 27 | 28 | 47 |
| | | Oct. 02, 1997 | | | | | | | | | | | | |
| 42 | HCWDS72 | 209852 | ZAP Express | 52 | 320 | 1 | 320 | 19 | 19 | 436 | 1 | 17 | 18 | 100 |
| | | May 07, 1998 | | | | | | | | | | | | |
| 43 | HCWKC15 | 209324 | ZAP Express | 53 | 710 | 1 | 710 | 37 | 37 | 437 | 1 | 18 | 19 | 40 |
| | | Oct. 02, 1997 | | | | | | | | | | | | |
| 44 | HCWUM50 | 209627 | ZAP Express | 54 | 1428 | 208 | 1428 | 270 | 270 | 438 | 1 | 30 | 31 | 45 |
| | | Feb. 12, 1998 | | | | | | | | | | | | |
| 45 | HDABR72 | 209965 | pSport1 | 55 | 1691 | 1 | 1691 | 33 | 33 | 439 | 1 | 29 | 30 | 146 |
| | | Jun. 11, 1998 | | | | | | | | | | | | |
| 45 | HDABR72 | 209965 | pSport1 | 277 | 1746 | 1 | 1746 | 28 | 28 | 661 | 1 | 29 | 30 | 146 |
| | | Jun. 11, 1998 | | | | | | | | | | | | |
| 46 | HDPBA28 | PTA-163 | pCMVSport | 56 | 3447 | 197 | 3447 | 259 | 259 | 440 | 1 | 32 | 33 | 941 |
| | | Jun. 01, 1999 | 3.0 | | | | | | | | | | | |
| 46 | HDPBA28 | PTA-163 | pCMVSport | 278 | 4909 | 1 | 4909 | 69 | 69 | 662 | 1 | 32 | 33 | 941 |
| | | Jun. 01, 1999 | 3.0 | | | | | | | | | | | |
| 47 | HDPBI32 | 209853 | pCMVSport | 57 | 1513 | 1 | 1513 | 37 | 37 | 441 | 1 | 315 | 316 | 316 |
| | | May 07, 1998 | 3.0 | | | | | | | | | | | |
| 47 | HDPBI32 | 209853 | pCMVSport | 279 | 1579 | 598 | 1184 | 103 | 103 | 663 | 1 | 30 | 31 | 271 |
| | | May 07, 1998 | 3.0 | | | | | | | | | | | |
| 47 | HDPBI32 | 209853 | pCMVSport | 280 | 587 | 1 | 587 | 51 | 51 | 664 | 1 | 35 | 36 | 138 |
| | | May 07, 1998 | 3.0 | | | | | | | | | | | |
| 48 | HDPCJ91 | 209877 | pCMVSport | 58 | 6107 | 1 | 6107 | 131 | 131 | 442 | 1 | 28 | 29 | 51 |
| | | May 18, 1998 | 3.0 | | | | | | | | | | | |
| 49 | HDPCL63 | PTA-1544 | pCMVSport | 59 | 3037 | 115 | 3037 | 35 | 35 | 443 | 1 | 58 | 59 | 267 |
| | | Mar. 21, 2000 | 3.0 | | | | | | | | | | | |
| 49 | HDPCL63 | PTA-1544 | pCMVSport | 281 | 2921 | 1 | 2921 | 260 | 260 | 665 | 1 | 17 | 18 | 157 |
| | | Mar. 21, 2000 | 3.0 | | | | | | | | | | | |
| 49 | HDPCL63 | PTA-1544 | pCMVSport | 282 | 1259 | 358 | 1259 | | 605 | 666 | 1 | 6 | 7 | 118 |
| | | Mar. 21, 2000 | 3.0 | | | | | | | | | | | |
| 50 | HDPCO25 | 209125 | pCMVSport | 60 | 767 | 76 | 767 | 182 | 182 | 444 | 1 | 20 | 21 | 53 |
| | | Jun. 19, 1997 | 3.0 | | | | | | | | | | | |
| 51 | HDPGT01 | 203027 | pCMVSport | 61 | 2687 | 138 | 2687 | 8 | 8 | 445 | 1 | 28 | 29 | 87 |
| | | Jun. 26, 1998 | 3.0 | | | | | | | | | | | |
| 52 | HDPHI51 | 209125 | pCMVSport | 62 | 728 | 1 | 728 | 245 | 245 | 446 | 1 | 30 | 31 | 40 |
| | | Jun. 19, 1997 | 3.0 | | | | | | | | | | | |
| 53 | HDPJM30 | 209563 | pCMVSport | 63 | 1635 | 308 | 1633 | 59 | 59 | 447 | 1 | 59 | 60 | 525 |
| | | Dec. 18, 1997 | 3.0 | | | | | | | | | | | |
| 53 | HDPJM30 | 209563 | pCMVSport | 283 | 1314 | 1 | 1313 | 259 | 259 | 667 | 1 | 20 | 21 | 59 |
| | | Dec. 18, 1997 | 3.0 | | | | | | | | | | | |
| 54 | HDPND46 | 209627 | pCMVSport | 64 | 1727 | 1 | 1727 | 15 | 15 | 448 | 1 | 22 | 23 | 484 |
| | | Feb. 12, 1998 | 3.0 | | | | | | | | | | | |
| 55 | HDPOJ08 | 209878 | pCMVSport | 65 | 1655 | 1 | 1655 | 159 | 159 | 449 | 1 | 18 | 19 | 122 |
| | | May 18, 1998 | 3.0 | | | | | | | | | | | |
| 56 | HDPPN86 | PTA-867 | pCMVSport | 66 | 6297 | 1 | 6297 | 127 | 127 | 450 | 1 | 32 | 33 | 46 |
| | | Oct. 26, 1999 | 3.0 | | | | | | | | | | | |
| 56 | HDPPN86 | PTA-867 | pCMVSport | 284 | 2042 | 1 | 2042 | 117 | 117 | 668 | 1 | 26 | 27 | 46 |
| | | Oct. 26, 1999 | 3.0 | | | | | | | | | | | |
| 57 | HDPSB18 | PTA-868 | pCMVSport | 67 | 3408 | 1 | 3408 | 123 | 123 | 451 | 1 | 18 | 19 | 66 |
| | | Oct. 26, 1999 | 3.0 | | | | | | | | | | | |
| 57 | HDPSB18 | PTA-868 | pCMVSport | 285 | 308 | 1 | 308 | | 116 | 669 | 1 | 17 | 18 | 64 |
| | | Oct. 26, 1999 | 3.0 | | | | | | | | | | | |
| 57 | HDPSB18 | PTA-868 | pCMVSport | 286 | 1568 | 1 | 1568 | | 1525 | 670 | 1 | 7 | 8 | 14 |
| | | Oct. 26, 1999 | 3.0 | | | | | | | | | | | |
| 57 | HDPSB18 | PTA-868 | pCMVSport | 287 | 865 | 1 | 865 | | 345 | 671 | 1 | 1 | 2 | 107 |
| | | Oct. 26, 1999 | 3.0 | | | | | | | | | | | |
| 58 | HDPSH53 | PTA-868 | pCMVSport | 68 | 1663 | 1 | 1663 | 158 | 158 | 452 | 1 | 19 | 20 | 90 |
| | | Oct. 26, 1999 | 3.0 | | | | | | | | | | | |
| 58 | HDPSH53 | PTA-868 | pCMVSport | 288 | 1687 | 1 | 1687 | 153 | 153 | 672 | 1 | 19 | 20 | 127 |
| | | Oct. 26, 1999 | 3.0 | | | | | | | | | | | |
| 58 | HDPSH53 | PTA-868 | pCMVSport | 289 | 570 | 1 | 570 | 212 | 212 | 673 | 1 | 19 | 20 | 90 |
| | | Oct. 26, 1999 | 3.0 | | | | | | | | | | | |
| 59 | HDPSP01 | 209745 | pCMVSport | 69 | 2343 | 1 | 2343 | 184 | 184 | 453 | 1 | 20 | 21 | 710 |
| | | Apr. 07, 1998 | 3.0 | | | | | | | | | | | |
| 59 | HDPSP01 | 209745 | pCMVSport | 290 | 1752 | 1 | 1752 | 227 | 227 | 674 | 1 | 20 | 21 | 308 |
| | | Apr. 07, 1998 | 3.0 | | | | | | | | | | | |
| 60 | HDPSP54 | 209782 | pCMVSport | 70 | 3091 | 2304 | 3091 | 2356 | 2356 | 454 | 1 | 18 | 19 | 48 |
| | | Apr. 20, 1998 | 3.0 | | | | | | | | | | | |
| 60 | HDPSP54 | 209782 | pCMVSport | 291 | 536 | 1 | 536 | 179 | 179 | 675 | 1 | 41 | 42 | 55 |
| | | Apr. 20, 1998 | 3.0 | | | | | | | | | | | |
| 61 | HDPUH26 | PTA-163 | pCMVSport | 71 | 2916 | 1 | 2916 | 90 | 90 | 455 | 1 | 18 | 19 | 549 |
| | | Jun. 01, 1999 | 3.0 | | | | | | | | | | | |
| 62 | HDPUW68 | 203331 | pCMVSport | 72 | 1748 | 1 | 1748 | 40 | 40 | 456 | 1 | 18 | 19 | 467 |
| | | Oct. 08, 1998 | 3.0 | | | | | | | | | | | |
| 63 | HDPWU34 | 209782 | pCMVSport | 73 | 1277 | 860 | 1277 | 117 | 117 | 457 | 1 | 23 | 24 | 325 |
| | | Apr. 20, 1998 | 3.0 | | | | | | | | | | | |
| 63 | HDPWU34 | 209782 | pCMVSport | 292 | 427 | 1 | 427 | 111 | 111 | 676 | 1 | 16 | 17 | 44 |
| | | Apr. 20, 1998 | 3.0 | | | | | | | | | | | |
| 64 | HDPXY01 | PTA-868 | pCMVSport | 74 | 766 | 1 | 766 | 23 | 23 | 458 | 1 | 37 | 38 | 98 |
| | | Oct. 26, 1999 | 3.0 | | | | | | | | | | | |
| 64 | HDPXY01 | PTA-868 | pCMVSport | 293 | 2409 | 1 | 2409 | 33 | 33 | 677 | 1 | 37 | 38 | 98 |
| | | Oct. 26, 1999 | 3.0 | | | | | | | | | | | |
| 64 | HDPXY01 | PTA-868 | pCMVSport | 294 | 737 | 1 | 423 | | 539 | 678 | 1 | 9 | 10 | 22 |
| | | Oct. 26, 1999 | 3.0 | | | | | | | | | | | |
| 64 | HDPXY01 | PTA-868 | pCMVSport | 295 | 1471 | 105 | 1471 | | 1190 | 679 | 1 | 16 | 17 | 25 |
| | | Oct. 26, 1999 | 3.0 | | | | | | | | | | | |
| 65 | HDTBV77 | 203070 | pCMVSport | 75 | 2181 | 1 | 2181 | 326 | 326 | 459 | 1 | 22 | 23 | 608 |
| | | Jul. 27, 1998 | 2.0 | | | | | | | | | | | |
| 66 | HDTDQ23 | 209965 | pCMVSport | 76 | 2207 | 1 | 2207 | 132 | 132 | 460 | 1 | 20 | 21 | 56 |
| | | Jun. 11, 1998 | 2.0 | | | | | | | | | | | |
| 66 | HDTDQ23 | 209965 | pCMVSport | 296 | 2227 | 1 | 2206 | 148 | 148 | 680 | 1 | 20 | 21 | 108 |
| | | Jun. 11, 1998 | 2.0 | | | | | | | | | | | |
| 66 | HDTDQ23 | 209965 | pCMVSport | 297 | 2214 | 1 | 2206 | 148 | 148 | 681 | 1 | 20 | 21 | 73 |
| | | Jun. 11, 1998 | 2.0 | | | | | | | | | | | |
| 67 | HE2DE47 | 97923 | Uni-ZAP | 77 | 3533 | 2821 | 3532 | 808 | 808 | 461 | 1 | 30 | 31 | 540 |
| | | Mar. 07, 1997 | XR | | | | | | | | | | | |
| | | 209071 | | | | | | | | | | | | |
| | | May 22, 1997 | | | | | | | | | | | | |
| 67 | HE2DE47 | 97923 | Uni-ZAP | 298 | 1145 | 435 | 1115 | 515 | 515 | 682 | 1 | 22 | 23 | 81 |
| | | Mar. 07, 1997 | XR | | | | | | | | | | | |
| | | 209071 | | | | | | | | | | | | |
| | | May 22, 1997 | | | | | | | | | | | | |
| 68 | HE2NV57 | 209877 | Uni-ZAP | 78 | 867 | 1 | 867 | 99 | 99 | 462 | 1 | 36 | 37 | 99 |
| | | May 18, 1998 | XR | | | | | | | | | | | |
| 69 | HE2PH36 | 209603 | Uni-ZAP | 79 | 1558 | 1 | 1558 | 28 | 28 | 463 | 1 | 21 | 22 | 66 |
| | | Jan. 29, 1998 | XR | | | | | | | | | | | |
| 70 | HE8DS15 | PTA-1544 | Uni-ZAP | 80 | 2199 | 1 | 2199 | 91 | 91 | 464 | 1 | 24 | 25 | 72 |
| | | Mar. 21, 2000 | XR | | | | | | | | | | | |
| 71 | HE9CO69 | 209551 | Uni-ZAP | 81 | 1077 | 1 | 1077 | 161 | 161 | 465 | 1 | 26 | 27 | 41 |
| | | Dec. 12, 1997 | XR | | | | | | | | | | | |
| 72 | HE9HY07 | 209010 | Uni-ZAP | 82 | 832 | 1 | 832 | 35 | 35 | 466 | 1 | 26 | 27 | 41 |
| | | Apr. 28, 1997 | XR | | | | | | | | | | | |
| | | 209085 | | | | | | | | | | | | |
| | | May 29, 1997 | | | | | | | | | | | | |
| 73 | HE9OW20 | 203570 | Uni-ZAP | 83 | 1209 | 1 | 1209 | 129 | 129 | 467 | 1 | 33 | 34 | 355 |
| | | Jan. 11, 1999 | XR | | | | | | | | | | | |
| 73 | HE9OW20 | 203570 | Uni-ZAP | 299 | 1165 | 1 | 1165 | 136 | 136 | 683 | 1 | 30 | 31 | 313 |
| | | Jan. 11, 1999 | XR | | | | | | | | | | | |
| 73 | HE9OW20 | 203570 | Uni-ZAP | 300 | 1160 | 1 | 1160 | 129 | 129 | 684 | 1 | 30 | 31 | 134 |
| | | Jan. 11, 1999 | XR | | | | | | | | | | | |
| 74 | HEEAG23 | 209745 | Uni-ZAP | 84 | 1669 | 25 | 1280 | 57 | 57 | 468 | 1 | 18 | 19 | 46 |
| | | Apr. 07, 1998 | XR | | | | | | | | | | | |
| 75 | HEOMQ63 | 209563 | pSport1 | 85 | 1336 | 1 | 1336 | 123 | 123 | 469 | 1 | 23 | 24 | 47 |
| | | Dec. 18, 1997 | | | | | | | | | | | | |
| 76 | HEPAB80 | 209423 | Uni-ZAP | 86 | 799 | 1 | 799 | 73 | 73 | 470 | 1 | 28 | 29 | 121 |
| | | Oct. 30, 1997 | XR | | | | | | | | | | | |
| 76 | HEPAB80 | 209423 | Uni-ZAP | 301 | 802 | 1 | 802 | 67 | 67 | 685 | 1 | 28 | 29 | 122 |
| | | Oct. 30, 1997 | XR | | | | | | | | | | | |
| 77 | HFABG18 | PTA-1544 | Uni-ZAP | 87 | 1345 | 1 | 1345 | 53 | 53 | 471 | 1 | 26 | 27 | 87 |
| | | Mar. 21, 2000 | XR | | | | | | | | | | | |
| 78 | HFABH95 | 209407 | Uni-ZAP | 88 | 1347 | 1 | 1347 | 199 | 199 | 472 | 1 | 21 | 22 | 116 |
| | | Oct. 23, 1997 | XR | | | | | | | | | | | |
| 79 | HFAEF57 | 209277 | Uni-ZAP | 89 | 642 | 1 | 642 | 232 | 232 | 473 | 1 | 42 | 43 | 86 |
| | | Sep. 18, 1997 | XR | | | | | | | | | | | |
| 80 | HFCEB37 | 209008 | Uni-ZAP | 90 | 802 | 352 | 802 | | 487 | 474 | 1 | | | 10 |
| | | Apr. 28, 1997 | XR | | | | | | | | | | | |
| | | 209084 | | | | | | | | | | | | |
| | | May 29, 1997 | | | | | | | | | | | | |
| 81 | HFFAD59 | 209242 | Lambda | 91 | 470 | 1 | 470 | 44 | 44 | 475 | 1 | 17 | 18 | 45 |
| | | Sep. 12, 1997 | ZAP II | | | | | | | | | | | |
| 82 | HFGAD82 | 209225 | Uni-ZAP | 92 | 1881 | 772 | 1861 | 1019 | 1019 | 476 | 1 | 18 | 19 | 38 |
| | | Aug. 28, 1997 | XR | | | | | | | | | | | |
| 83 | HFIIN69 | PTA-846 | pSport1 | 93 | 1450 | 1 | 1450 | 45 | 45 | 477 | 1 | 39 | 40 | 43 |
| | | Oct. 13, 1999 | | | | | | | | | | | | |
| 83 | HFIIN69 | PTA-846 | pSport1 | 302 | 559 | 1 | 559 | 52 | 52 | 686 | 1 | 39 | 40 | 43 |
| | | Oct. 13, 1999 | | | | | | | | | | | | |
| 83 | HFIIN69 | PTA-846 | pSport1 | 303 | 678 | 1 | 678 | | 280 | 687 | 1 | | | 2 |
| | | Oct. 13, 1999 | | | | | | | | | | | | |
| 84 | HFIUR10 | 209277 | pSport1 | 94 | 541 | 1 | 541 | 50 | 50 | 478 | 1 | 22 | 23 | 44 |
| | | Sep. 18, 1997 | | | | | | | | | | | | |
| 85 | HFKFG02 | 209627 | Uni-ZAP | 95 | 795 | 1 | 795 | 110 | 110 | 479 | 1 | 18 | 19 | 53 |
| | | Feb. 12, 1998 | XR | | | | | | | | | | | |
| 86 | HFTBM50 | 209300 | Uni-ZAP | 96 | 762 | 1 | 740 | 158 | 158 | 480 | 1 | 20 | 21 | 34 |
| | | Sep. 25, 1997 | XR | | | | | | | | | | | |
| 87 | HFTDZ36 | 209300 | Uni-ZAP | 97 | 1103 | 231 | 1103 | 547 | 547 | 481 | 1 | 22 | 23 | 68 |
| | | Sep. 25, 1997 | XR | | | | | | | | | | | |
| 88 | HFXBL33 | 203071 | Lambda | 98 | 1633 | 1 | 1633 | 152 | 152 | 482 | 1 | 24 | 25 | 162 |
| | | Jul. 27, 1998 | ZAP II | | | | | | | | | | | |
| 89 | HFXHK73 | 209580 | Lambda | 99 | 1873 | 1 | 1873 | 247 | 247 | 483 | 1 | 36 | 37 | 67 |
| | | Jan. 14, 1998 | ZAP II | | | | | | | | | | | |
| 90 | HFXJX44 | 209782 | Lambda | 100 | 1384 | 1 | 1384 | 98 | 98 | 484 | 1 | 18 | 19 | 47 |
| | | Apr. 20, 1998 | ZAP II | | | | | | | | | | | |
| 91 | HFXKY27 | 209877 | Lambda | 101 | 945 | 1 | 945 | 44 | 44 | 485 | 1 | 19 | 20 | 58 |
| | | May 18, 1998 | ZAP II | | | | | | | | | | | |
| 92 | HGBHI35 | 209423 | Uni-ZAP | 102 | 1437 | 71 | 1276 | 87 | 87 | 486 | 1 | 16 | 17 | 292 |
| | | Oct. 30, 1997 | XR | | | | | | | | | | | |
| 93 | HGLAF75 | 209407 | Uni-ZAP | 103 | 776 | 1 | 776 | 231 | 231 | 487 | 1 | 28 | 29 | 121 |
| | | Oct. 23, 1997 | XR | | | | | | | | | | | |
| 94 | HHBCS39 | PTA-848 | pCMVSport1 | 104 | 2895 | 1 | 2895 | 104 | 104 | 488 | 1 | 26 | 27 | 166 |
| | | Oct. 13, 1999 | | | | | | | | | | | | |
| 94 | HHBCS39 | PTA-848 | pCMVSport1 | 304 | 1042 | 1 | 1042 | 150 | 150 | 688 | 1 | 26 | 27 | 166 |
| | | Oct. 13, 1999 | | | | | | | | | | | | |
| 94 | HHBCS39 | PTA-848 | pCMVSport1 | 305 | 1556 | 171 | 1556 | | 1260 | 689 | 1 | 16 | 17 | 26 |
| | | Oct. 13, 1999 | | | | | | | | | | | | |
| 95 | HHEAA08 | 209853 | pCMVSport | 105 | 2150 | 1 | 2150 | 88 | 88 | 489 | 1 | 38 | 39 | 79 |
| | | May 07, 1998 | 3.0 | | | | | | | | | | | |
| 95 | HHEAA08 | 209853 | pCMVSport | 306 | 615 | 1 | 615 | | 311 | 690 | 1 | 13 | 14 | 20 |
| | | May 07, 1998 | 3.0 | | | | | | | | | | | |
| 96 | HHENV10 | 209368 | pCMVSport | 106 | 1155 | 1 | 1155 | 143 | 143 | 490 | 1 | 27 | 28 | 50 |
| | | Oct. 16, 1997 | 3.0 | | | | | | | | | | | |
| 97 | HHFFJ48 | 209627 | Uni-ZAP | 107 | 2566 | 1 | 2566 | 65 | 65 | 491 | 1 | 21 | 22 | 106 |
| | | Feb. 12, 1998 | XR | | | | | | | | | | | |
| 98 | HHFHJ59 | 97975 | Uni-ZAP | 108 | 661 | 1 | 661 | 192 | 192 | 492 | 1 | 29 | 30 | 112 |
| | | Apr. 04, 1997 | XR | | | | | | | | | | | |
| | | 209081 | | | | | | | | | | | | |
| | | May 29, 1997 | | | | | | | | | | | | |
| 99 | HHGBO91 | 209242 | Lambda | 109 | 715 | 1 | 715 | 140 | 140 | 493 | 1 | 28 | 29 | 49 |
| | | Sep. 12, 1997 | ZAP II | | | | | | | | | | | |
| 100 | HHGCG53 | 97899 | Lambda | 110 | 407 | 1 | 407 | 230 | 230 | 494 | 1 | 33 | 34 | 44 |
| | | Feb. 26, 1997 | ZAP II | | | | | | | | | | | |
| | | 209045 | | | | | | | | | | | | |
| | | May 15, 1997 | | | | | | | | | | | | |
| 101 | HHGCM76 | 97958 | Lambda | 111 | 711 | 8 | 711 | 270 | 270 | 495 | 1 | 22 | 23 | 89 |
| | | Mar. 13, 1997 | ZAP II | | | | | | | | | | | |
| | | 209072 | | | | | | | | | | | | |
| | | May 22, 1997 | | | | | | | | | | | | |
| 101 | HHGCM76 | 97958 | Lambda | 307 | 711 | 8 | 711 | 270 | 270 | 691 | 1 | | | 11 |
| | | Mar. 13, 1997 | ZAP II | | | | | | | | | | | |
| | | 209072 | | | | | | | | | | | | |
| | | May 22, 1997 | | | | | | | | | | | | |
| 102 | HHGCQ54 | 209300 | Lambda | 112 | 875 | 1 | 875 | 62 | 62 | 496 | 1 | 15 | 16 | 51 |
| | | Sep. 25, 1997 | ZAP II | | | | | | | | | | | |
| 103 | HHPEN62 | 209746 | Uni-ZAP | 113 | 2152 | 141 | 2152 | 183 | 183 | 497 | 1 | 27 | 28 | 508 |
| | | Apr. 07, 1998 | XR | | | | | | | | | | | |
| 104 | HJABB94 | 209119 | pBluescript | 114 | 1555 | 1 | 1555 | 74 | 74 | 498 | 1 | 28 | 29 | 77 |
| | | Jun. 12, 1997 | SK− | | | | | | | | | | | |
| 105 | HJACG02 | 209215 | pBluescript | 115 | 575 | 1 | 575 | 66 | 66 | 499 | 1 | 22 | 23 | 108 |
| | | Aug. 21, 1997 | SK− | | | | | | | | | | | |
| 105 | HJACG02 | 209215 | pBluescript | 308 | 553 | 1 | 553 | 47 | 47 | 692 | 1 | 23 | 24 | 108 |
| | | Aug. 21, 1997 | SK− | | | | | | | | | | | |
| 106 | HJACG30 | PTA-843 | pBluescript | 116 | 1532 | 1 | 1532 | 291 | 291 | 500 | 1 | 27 | 28 | 44 |
| | | Oct. 13, 1999 | SK− | | | | | | | | | | | |
| 106 | HJACG30 | PTA-843 | pBluescript | 309 | 1614 | 1020 | 1614 | | 50 | 693 | 1 | 1 | 2 | 130 |
| | | Oct. 13, 1999 | SK− | | | | | | | | | | | |
| 106 | HJACG30 | PTA-843 | pBluescript | 310 | 1087 | 491 | 1087 | | 350 | 694 | 1 | 1 | 2 | 122 |
| | | Oct. 13, 1999 | SK− | | | | | | | | | | | |
| 107 | HJBCY35 | 209877 | pBluescript | 117 | 1559 | 93 | 1272 | 232 | 232 | 501 | 1 | 23 | 24 | 327 |
| | | May 18, 1998 | SK− | | | | | | | | | | | |
| 108 | HJPAD75 | 209641 | Uni-ZAP | 118 | 1231 | 1 | 1231 | 60 | 60 | 502 | 1 | 29 | 30 | 91 |
| | | Feb. 25, 1998 | XR | | | | | | | | | | | |
| 109 | HKABZ65 | 209683 | pCMVSport | 119 | 1189 | 1 | 1189 | 77 | 77 | 503 | 1 | 17 | 18 | 243 |
| | | Mar. 20, 1998 | 2.0 | | | | | | | | | | | |
| 109 | HKABZ65 | 209683 | pCMVSport | 311 | 1191 | 1 | 1191 | 69 | 69 | 695 | 1 | 17 | 18 | 243 |
| | | Mar. 20, 1998 | 2.0 | | | | | | | | | | | |
| 110 | HKACD58 | 209346 | pCMVSport | 120 | 3153 | 1 | 3153 | 38 | 38 | 504 | 1 | 25 | 26 | 301 |
| | | Oct. 09, 1997 | 2.0 | | | | | | | | | | | |
| 110 | HKACD58 | 209346 | pCMVSport | 312 | 1626 | 1 | 1626 | 35 | 35 | 696 | 1 | 25 | 26 | 154 |
| | | Oct. 09, 1997 | 2.0 | | | | | | | | | | | |
| 111 | HKAEV06 | 209627 | pCMVSport | 121 | 2496 | 1 | 2496 | 501 | 501 | 505 | 1 | 30 | 31 | 438 |
| | | Feb. 12, 1998 | 2.0 | | | | | | | | | | | |
| 111 | HKAEV06 | 209627 | pCMVSport | 313 | 2351 | 1 | 2351 | 197 | 197 | 697 | 1 | 29 | 30 | 57 |
| | | Feb. 12, 1998 | 2.0 | | | | | | | | | | | |
| 112 | HKAFT66 | PTA-849 | pCMVSport | 122 | 1001 | 270 | 1001 | 508 | 508 | 506 | 1 | 41 | 42 | 107 |
| | | Oct. 13, 1999 | 2.0 | | | | | | | | | | | |
| 112 | HKAFT66 | PTA-849 | pCMVSport | 314 | 1001 | 270 | 1001 | 508 | 508 | 698 | 1 | 41 | 42 | 107 |
| | | Oct. 13, 1999 | 2.0 | | | | | | | | | | | |
| 112 | HKAFT66 | PTA-849 | pCMVSport | 315 | 669 | 1 | 669 | 234 | 234 | 699 | 1 | | | 37 |
| | | Oct. 13, 1999 | 2.0 | | | | | | | | | | | |
| 113 | HKB1E57 | 209651 | pCMVSport1 | 123 | 1142 | 1038 | 1142 | 178 | 178 | 507 | 1 | 30 | 31 | 234 |
| | | Mar. 04, 1998 | | | | | | | | | | | | |
| 113 | HKB1E57 | 209651 | pCMVSport1 | 316 | 417 | 1 | 417 | 30 | 30 | 700 | 1 | 26 | 27 | 46 |
| | | Mar. 04, 1998 | | | | | | | | | | | | |
| 114 | HKFBC53 | 209782 | ZAP Express | 124 | 2238 | 1 | 2238 | 64 | 64 | 508 | 1 | 15 | 16 | 470 |
| | | Apr. 20, 1998 | | | | | | | | | | | | |
| 114 | HKFBC53 | 209782 | ZAPExpress | 317 | 1949 | 1 | 1906 | 41 | 41 | 701 | 1 | 18 | 19 | 442 |
| | | Apr. 20, 1998 | | | | | | | | | | | | |
| 114 | HKFBC53 | 209782 | ZAP Express | 318 | 1487 | 1 | 1487 | | 3 | 702 | 1 | 1 | 2 | 309 |
| | | Apr. 20, 1998 | | | | | | | | | | | | |
| 114 | HKFBC53 | 209782 | ZAP Express | 319 | 1525 | 1 | 1525 | | 3 | 703 | 1 | 1 | 2 | 243 |
| | | Apr. 20, 1998 | | | | | | | | | | | | |
| 115 | HKGDL36 | 209877 | pSport1 | 125 | 1052 | 1 | 1052 | 53 | 53 | 509 | 1 | 33 | 34 | 260 |
| | | May 18, 1998 | | | | | | | | | | | | |
| 115 | HKGDL36 | 209877 | pSport1 | 320 | 1050 | 1 | 1050 | 55 | 55 | 704 | 1 | 33 | 34 | 148 |
| | | May 18, 1998 | | | | | | | | | | | | |
| 116 | HKISB57 | 209603 | pBluescript | 126 | 1492 | 1 | 1439 | 130 | 130 | 510 | 1 | 19 | 20 | 95 |
| | | Jan. 29, 1998 | | | | | | | | | | | | |
| 117 | HKMMW74 | 209463 | pBluescript | 127 | 1794 | 1 | 1794 | 202 | 202 | 511 | 1 | 21 | 22 | 41 |
| | | Nov. 14, 1997 | | | | | | | | | | | | |
| 118 | HLDNA86 | 209277 | pCMVSport | 128 | 1346 | 1 | 1346 | 238 | 238 | 512 | 1 | 34 | 35 | 163 |
| | | Sep. 18, 1997 | 3.0 | | | | | | | | | | | |
| 118 | HLDNA86 | 209277 | pCMVSport | 321 | 720 | 1 | 717 | 45 | 45 | 705 | 1 | 31 | 32 | 92 |
| | | Sep. 18, 1997 | 3.0 | | | | | | | | | | | |
| 119 | HLDON23 | 209628 | pCMVSport | 129 | 1262 | 208 | 1256 | 368 | 368 | 513 | 1 | 20 | 21 | 113 |
| | | Feb. 12, 1998 | 3.0 | | | | | | | | | | | |
| 120 | HLDQR62 | 203027 | pCMVSport | 130 | 2572 | 427 | 2572 | 520 | 520 | 514 | 1 | 18 | 19 | 161 |
| | | Jun. 26, 1998 | 3.0 | | | | | | | | | | | |
| 121 | HLDQU79 | 203071 | pCMVSport | 131 | 1488 | 1 | 1488 | 99 | 99 | 515 | 1 | 23 | 24 | 348 |
| | | Jul. 27, 1998 | 3.0 | | | | | | | | | | | |
| 122 | HLHAL68 | 209746 | Uni-ZAP | 132 | 704 | 1 | 704 | 30 | 30 | 516 | 1 | 21 | 22 | 44 |
| | | Apr. 07, 1998 | XR | | | | | | | | | | | |
| 123 | HLIBD68 | 203071 | pCMVSport1 | 133 | 1022 | 1 | 1022 | 186 | 186 | 517 | 1 | 35 | 36 | 50 |
| | | Jul. 27, 1998 | | | | | | | | | | | | |
| 124 | HLICQ90 | 203517 | pCMVSport1 | 134 | 1766 | 1 | 1766 | 249 | 249 | 518 | 1 | 29 | 30 | 206 |
| | | Dec. 10, 1998 | | | | | | | | | | | | |
| 125 | HLQDR48 | 209603 | Lambda | 135 | 989 | 1 | 989 | 10 | 10 | 519 | 1 | 21 | 22 | 190 |
| | | Jan. 29, 1998 | ZAP II | | | | | | | | | | | |
| 125 | HLQDR48 | 209603 | Lambda | 322 | 990 | 1 | 990 | 3 | 3 | 706 | 1 | 21 | 22 | 190 |
| | | Jan. 29, 1998 | ZAP II | | | | | | | | | | | |
| 126 | HLTHR66 | 209782 | Uni-ZAP | 136 | 2286 | 1 | 2286 | 5 | 5 | 520 | 1 | 34 | 35 | 75 |
| | | Apr. 20, 1998 | XR | | | | | | | | | | | |
| 127 | HLTIP94 | PTA-2076 | Uni-ZAP | 137 | 1240 | 1 | 1170 | 226 | 226 | 521 | 1 | 26 | 27 | 97 |
| | | Jun. 09, 2000 | XR | | | | | | | | | | | |
| 127 | HLTIP94 | PTA-2076 | Uni-ZAP | 323 | 647 | 1 | 647 | 226 | 226 | 707 | 1 | 26 | 27 | 65 |
| | | Jun. 09, 2000 | XR | | | | | | | | | | | |
| 127 | HLTIP94 | PTA-2076 | Uni-ZAP | 324 | 1321 | 870 | 1209 | | 3 | 708 | 1 | 1 | 2 | 299 |
| | | Jun. 09, 2000 | XR | | | | | | | | | | | |
| 128 | HLWAA17 | 209626 | pCMVSport | 138 | 997 | 246 | 997 | 436 | 436 | 522 | 1 | 15 | 16 | 187 |
| | | Feb. 12, 1998 | 3.0 | | | | | | | | | | | |
| 129 | HLWBK05 | 203331 | pCMVSport | 139 | 2383 | 157 | 2383 | 280 | 280 | 523 | 1 | 34 | 35 | 298 |
| | | Oct. 08, 1998 | 3.0 | | | | | | | | | | | |
| 130 | HLWBY76 | 203517 | pCMVSport | 140 | 2081 | 1 | 2081 | 432 | 432 | 524 | 1 | 27 | 28 | 232 |
| | | Dec. 10, 1998 | 3.0 | | | | | | | | | | | |
| 131 | HLWCF05 | 209126 | pCMVSport | 141 | 646 | 1 | 646 | 155 | 155 | 525 | 1 | 36 | 37 | 58 |
| | | Jun. 19, 1997 | 3.0 | | | | | | | | | | | |
| 132 | HLYAC95 | 203071 | pSport1 | 142 | 312 | 1 | 312 | 92 | 92 | 526 | 1 | 16 | 17 | 46 |
| | | Jul. 27, 1998 | | | | | | | | | | | | |
| 133 | HLYAN59 | 209346 | pSport1 | 143 | 770 | 1 | 770 | 383 | 383 | 527 | 1 | 40 | 41 | 77 |
| | | Oct. 09, 1997 | | | | | | | | | | | | |
| 133 | HLYAN59 | 209346 | pSport1 | 325 | 729 | 1 | 729 | 254 | 254 | 709 | 1 | 39 | 40 | 54 |
| | | Oct. 09, 1997 | | | | | | | | | | | | |
| 134 | HLYAP91 | 209346 | pSport1 | 144 | 1276 | 1 | 1276 | 280 | 280 | 528 | 1 | 29 | 30 | 83 |
| | | Oct. 09, 1997 | | | | | | | | | | | | |
| 135 | HLYES38 | 209853 | pSport1 | 145 | 1223 | 1 | 1223 | 69 | 69 | 529 | 1 | 22 | 23 | 73 |
| | | May 07, 1998 | | | | | | | | | | | | |
| 136 | HMADK33 | 209368 | Uni-ZAP | 146 | 864 | 1 | 864 | 161 | 161 | 530 | 1 | 24 | 25 | 152 |
| | | Oct. 16, 1997 | XR | | | | | | | | | | | |
| 137 | HMADS41 | 209563 | Uni-ZAP | 147 | 1267 | 1 | 1267 | 267 | 267 | 531 | 1 | 21 | 22 | 88 |
| | | Dec. 18, 1997 | XR | | | | | | | | | | | |
| 138 | HMAMI15 | PTA-2075 | Uni-ZAP | 148 | 1258 | 1 | 1258 | 4 | 4 | 532 | 1 | 26 | 27 | 340 |
| | | Jun. 09, 2000 | XR | | | | | | | | | | | |
| 138 | HMAMI15 | PTA-2075 | Uni-ZAP | 326 | 1084 | 1 | 1084 | 3 | 3 | 710 | 1 | 26 | 27 | 306 |
| | | Jun. 09, 2000 | XR | | | | | | | | | | | |
| 139 | HMCFY13 | 209628 | Uni-ZAP | 149 | 883 | 1 | 883 | 175 | 175 | 533 | 1 | 27 | 28 | 64 |
| | | Feb. 12, 1998 | XR | | | | | | | | | | | |
| 140 | HMDAB56 | 209368 | Uni-ZAP | 150 | 1465 | 1 | 1465 | 273 | 273 | 534 | 1 | 32 | 33 | 44 |
| | | Oct. 16, 1997 | XR | | | | | | | | | | | |
| 141 | HMEED18 | 209368 | Lambda | 151 | 1369 | 28 | 1369 | 34 | 34 | 535 | 1 | 34 | 35 | 221 |
| | | Oct. 16, 1997 | ZAP II | | | | | | | | | | | |
| 142 | HMEFT54 | 209243 | Lambda | 152 | 596 | 1 | 596 | 332 | 332 | 536 | 1 | 19 | 20 | 39 |
| | | Sep. 12, 1997 | ZAP II | | | | | | | | | | | |
| 143 | HMEGF92 | 209243 | Lambda | 153 | 629 | 1 | 611 | 92 | 92 | 537 | 1 | 27 | 28 | 62 |
| | | Sep. 12, 1997 | ZAP II | | | | | | | | | | | |
| 144 | HMSDL37 | PTA-842 | Uni-ZAP | 154 | 2497 | 1 | 2497 | 531 | 531 | 538 | 1 | 26 | 27 | 64 |
| | | Oct. 13, 1999 | XR | | | | | | | | | | | |
| 144 | HMSDL37 | PTA-842 | Uni-ZAP | 327 | 1776 | 1 | 1776 | 528 | 528 | 711 | 1 | 26 | 27 | 64 |
| | | Oct. 13, 1999 | XR | | | | | | | | | | | |
| 144 | HMSDL37 | PTA-842 | Uni-ZAP | 328 | 784 | 1 | 784 | 565 | 565 | 712 | 1 | 6 | 7 | 26 |
| | | Oct. 13, 1999 | XR | | | | | | | | | | | |
| 144 | HMSDL37 | PTA-842 | Uni-ZAP | 329 | 699 | 275 | 427 | | 2 | 713 | 1 | 1 | 2 | 50 |
| | | Oct. 13, 1999 | XR | | | | | | | | | | | |
| 145 | HMSFI26 | 209368 | Uni-ZAP | 155 | 1217 | 1 | 1217 | 120 | 120 | 539 | 1 | 34 | 35 | 62 |
| | | Oct. 16, 1997 | XR | | | | | | | | | | | |
| 146 | HMSJU68 | 209076 | Uni-ZAP | 156 | 1123 | 4 | 1123 | 272 | 272 | 540 | 1 | 31 | 32 | 49 |
| | | May 22, 1997 | XR | | | | | | | | | | | |
| 147 | HMTBI36 | PTA-322 | pCMVSport | 157 | 3388 | 1 | 3388 | 256 | 256 | 541 | 1 | 18 | 19 | 957 |
| | | Jul. 09, 1999 | 3.0 | | | | | | | | | | | |
| 147 | HMTBI36 | PTA-322 | pCMVSport | 330 | 3546 | 1 | 3363 | 255 | 255 | 714 | 1 | 18 | 19 | 957 |
| | | Jul. 09, 1999 | 3.0 | | | | | | | | | | | |
| 148 | HMVBS81 | 209628 | pSport1 | 158 | 529 | 1 | 529 | 34 | 34 | 542 | 1 | 43 | 44 | 139 |
| | | Feb. 12, 1998 | | | | | | | | | | | | |
| 149 | HMWDC28 | 209126 | Uni-ZAP | 159 | 1146 | 105 | 754 | 124 | 124 | 543 | 1 | 30 | 31 | 42 |
| | | Jun. 19, 1997 | XR | | | | | | | | | | | |
| 150 | HMWFT65 | 209368 | Uni-ZAP | 160 | 1346 | 1 | 1346 | 72 | 72 | 544 | 1 | 27 | 28 | 121 |
| | | Oct. 16, 1997 | XR | | | | | | | | | | | |
| 151 | HNEEE24 | 209346 | Uni-ZAP | 161 | 1079 | 1 | 1079 | 213 | 213 | 545 | 1 | 21 | 22 | 71 |
| | | Oct. 09, 1997 | XR | | | | | | | | | | | |
| 152 | HNFFC43 | 203027 | Uni-ZAP | 162 | 2103 | 209 | 2058 | 488 | 488 | 546 | 1 | 12 | 13 | 68 |
| | | Jun. 26, 1998 | XR | | | | | | | | | | | |
| 153 | HNFGF20 | 203071 | Uni-ZAP | 163 | 1370 | 38 | 1370 | 206 | 206 | 547 | 1 | 45 | 46 | 143 |
| | | Jul. 27, 1998 | XR | | | | | | | | | | | |
| 154 | HNFIY77 | 209628 | pBluescript | 164 | 1212 | 28 | 1212 | 228 | 228 | 548 | 1 | 34 | 35 | 233 |
| | | Feb. 12, 1998 | | | | | | | | | | | | |
| 155 | HNFJF07 | 209463 | Uni-ZAP | 165 | 616 | 1 | 616 | 86 | 86 | 549 | 1 | 21 | 22 | 66 |
| | | Nov. 14, 1997 | XR | | | | | | | | | | | |
| 156 | HNGDJ72 | 209299 | Uni-ZAP | 166 | 524 | 1 | 524 | 185 | 185 | 550 | 1 | 19 | 20 | 113 |
| | | Sep. 25, 1997 | XR | | | | | | | | | | | |
| 157 | HNGEP09 | 209197 | Uni-ZAP | 167 | 1042 | 1 | 1042 | 72 | 72 | 551 | 1 | 15 | 16 | 82 |
| | | Aug. 08, 1997 | XR | | | | | | | | | | | |
| 158 | HNGFR31 | 209407 | Uni-ZAP | 168 | 536 | 1 | 536 | 108 | 108 | 552 | 1 | 23 | 24 | 90 |
| | | Oct. 23, 1997 | XR | | | | | | | | | | | |
| 159 | HNGIJ31 | 209236 | Uni-ZAP | 169 | 796 | 1 | 796 | 135 | 135 | 553 | 1 | 16 | 17 | 36 |
| | | Sep. 04, 1997 | XR | | | | | | | | | | | |
| 160 | HNGJE50 | 209368 | Uni-ZAP | 170 | 1037 | 1 | 1037 | 77 | 77 | 554 | 1 | 36 | 37 | 46 |
| | | Oct. 16, 1997 | XR | | | | | | | | | | | |
| 161 | HNGND37 | 203648 | Uni-ZAP | 171 | 841 | 1 | 841 | 388 | 388 | 555 | 1 | 27 | 28 | 82 |
| | | Feb. 09, 1999 | XR | | | | | | | | | | | |
| 162 | HNGOI12 | PTA-847 | Uni-ZAP | 172 | 2128 | 1 | 2128 | 27 | 27 | 556 | 1 | 34 | 35 | 57 |
| | | Oct. 13, 1999 | XR | | | | | | | | | | | |
| 162 | HNGOI12 | PTA-847 | Uni-ZAP | 331 | 774 | 1 | 774 | 27 | 27 | 715 | 1 | 34 | 35 | 57 |
| | | Oct. 13, 1999 | XR | | | | | | | | | | | |
| 162 | HNGOI12 | PTA-847 | Uni-ZAP | 332 | 1396 | 1 | 1396 | | 596 | 716 | 1 | 25 | 26 | 93 |
| | | Oct. 13, 1999 | XR | | | | | | | | | | | |
| 163 | HNHEU93 | 209628 | Uni-ZAP | 173 | 748 | 1 | 748 | 57 | 57 | 557 | 1 | 34 | 35 | 81 |
| | | Feb. 12, 1998 | XR | | | | | | | | | | | |
| 164 | HNHFM14 | 209683 | Uni-ZAP | 174 | 297 | 1 | 297 | 38 | 38 | 558 | 1 | 28 | 29 | 80 |
| | | Mar. 20, 1998 | XR | | | | | | | | | | | |
| 165 | HNHFR04 | 209683 | Uni-ZAP | 175 | 1681 | 1 | 1681 | 71 | 71 | 559 | 1 | 21 | 22 | 78 |
| | | Mar. 20, 1998 | XR | | | | | | | | | | | |
| 166 | HNHNB29 | PTA-623 | Uni-ZAP | 176 | 1894 | 1 | 1894 | 40 | 40 | 560 | 1 | 20 | 21 | 53 |
| | | Sep. 02, 1999 | XR | | | | | | | | | | | |
| 167 | HNHOD46 | PTA-1543 | Uni-ZAP | 177 | 1355 | 1 | 1355 | 12 | 12 | 561 | 1 | 20 | 21 | 80 |
| | | Mar. 21, 2000 | XR | | | | | | | | | | | |
| 168 | HNTBI26 | 209563 | pCMVSport | 178 | 1382 | 1 | 1382 | 28 | 28 | 562 | 1 | 35 | 36 | 320 |
| | | Dec. 18, 1997 | 3.0 | | | | | | | | | | | |
| 168 | HNTBI26 | 209563 | pCMVSport | 333 | 1397 | 1 | 1397 | 32 | 32 | 717 | 1 | 35 | 36 | 172 |
| | | Dec. 18, 1997 | 3.0 | | | | | | | | | | | |
| 168 | HNTBI26 | 209563 | pCMVSport | 334 | 1368 | 1 | 1368 | 16 | 16 | 718 | 1 | 35 | 36 | 131 |
| | | Dec. 18, 1997 | 3.0 | | | | | | | | | | | |
| 169 | HNTBL27 | 209324 | pCMVSport | 179 | 791 | 71 | 791 | 100 | 100 | 563 | 1 | 23 | 24 | 115 |
| | | Oct. 02, 1997 | 3.0 | | | | | | | | | | | |
| 170 | HNTCE26 | PTA-1544 | pCMVSport | 180 | 2163 | 830 | 2163 | 111 | 111 | 564 | 1 | 30 | 31 | 402 |
| | | Mar. 21, 2000 | 3.0 | | | | | | | | | | | |
| 170 | HNTCE26 | PTA-1544 | pCMVSport | 335 | 1763 | 1 | 1763 | 57 | 57 | 719 | 1 | 28 | 29 | 121 |
| | | Mar. 21, 2000 | 3.0 | | | | | | | | | | | |
| 171 | HNTNC20 | 209782 | pSport1 | 181 | 1979 | 1 | 1979 | 270 | 270 | 565 | 1 | 19 | 20 | 218 |
| | | Apr. 20, 1998 | | | | | | | | | | | | |
| 172 | HNTNI01 | 209782 | pSport1 | 182 | 2087 | 1 | 2087 | 307 | 307 | 566 | 1 | 33 | 34 | 76 |
| | | Apr. 20, 1998 | | | | | | | | | | | | |
| 172 | HNTNI01 | 209782 | pSport1 | 336 | 1274 | 1 | 1114 | 306 | 306 | 720 | 1 | 33 | 34 | 49 |
| | | Apr. 20, 1998 | | | | | | | | | | | | |
| 173 | HNTSY18 | PTA-855 | pSport1 | 183 | 1811 | 265 | 1783 | 257 | 257 | 567 | 1 | 31 | 32 | 89 |
| | | Oct. 18, 1999 | | | | | | | | | | | | |
| 173 | HNTSY18 | PTA-855 | pSport1 | 337 | 847 | 742 | 819 | | 420 | 721 | 1 | 1 | 2 | 79 |
| | | Oct. 18, 1999 | | | | | | | | | | | | |
| 174 | HOCNF19 | 203570 | pSport1 | 184 | 1118 | 1 | 1118 | 166 | 166 | 568 | 1 | 20 | 21 | 87 |
| | | Jan. 11, 1999 | | | | | | | | | | | | |
| 175 | HODDF13 | 203069 | Uni-ZAP | 185 | 830 | 1 | 830 | 46 | 46 | 569 | 1 | 23 | 24 | 41 |
| | | Jul. 27, 1998 | XR | | | | | | | | | | | |
| 176 | HODDN92 | 209012 | Uni-ZAP | 186 | 1939 | 294 | 1939 | | 434 | 570 | 1 | 26 | 27 | 35 |
| | | Apr. 28, 1997 | XR | | | | | | | | | | | |
| | | 209089 | | | | | | | | | | | | |
| | | Jun. 05, 1997 | | | | | | | | | | | | |
| 177 | HODEJ32 | 203570 | Uni-ZAP | 187 | 739 | 1 | 739 | 358 | 358 | 571 | 1 | 21 | 22 | 43 |
| | | Jan. 11, 1999 | XR | | | | | | | | | | | |
| 178 | HOFMQ33 | PTA-848 | pCMVSport | 188 | 2410 | 1 | 2410 | 49 | 49 | 572 | 1 | 24 | 25 | 484 |
| | | Oct. 13, 1999 | 2.0 | | | | | | | | | | | |
| 178 | HOFMQ33 | PTA-848 | pCMVSport | 338 | 2409 | 1 | 2409 | 48 | 48 | 722 | 1 | 24 | 25 | 484 |
| | | Oct. 13, 1999 | 2.0 | | | | | | | | | | | |
| 178 | HOFMQ33 | PTA-848 | pCMVSport | 339 | 876 | 1 | 876 | 78 | 78 | 723 | 1 | 24 | 25 | 266 |
| | | Oct. 13, 1999 | 2.0 | | | | | | | | | | | |
| 178 | HOFMQ33 | PTA-848 | pCMVSport | 340 | 1586 | 1 | 1586 | | 724 | 724 | 1 | | | 5 |
| | | Oct. 13, 1999 | 2.0 | | | | | | | | | | | |
| 178 | HOFMQ33 | PTA-848 | pCMVSport | 341 | 1011 | 873 | 1011 | | 123 | 725 | 1 | 1 | 2 | 84 |
| | | Oct. 13, 1999 | 2.0 | | | | | | | | | | | |
| 179 | HOHBY44 | PTA-867 | pCMVSport | 189 | 3369 | 1 | 3369 | 170 | 170 | 573 | 1 | 24 | 25 | 184 |
| | | Oct. 26, 1999 | 2.0 | | | | | | | | | | | |
| 179 | HOHBY44 | PTA-867 | pCMVSport | 342 | 1063 | 533 | 1063 | | 2 | 726 | 1 | 1 | 2 | 77 |
| | | Oct. 26, 1999 | 2.0 | | | | | | | | | | | |
| 179 | HOHBY44 | PTA-867 | pCMVSport | 343 | 1178 | 1 | 1178 | | 54 | 727 | 1 | 1 | 2 | 84 |
| | | Oct. 26, 1999 | 2.0 | | | | | | | | | | | |
| 180 | HOQBJ82 | PTA-845 | Uni-ZAP | 190 | 3530 | 1 | 3530 | 361 | 361 | 574 | 1 | 21 | 22 | 164 |
| | | Oct. 13, 1999 | XR | | | | | | | | | | | |
| 180 | HOQBJ82 | PTA-845 | Uni-ZAP | 344 | 585 | 64 | 585 | 102 | 102 | 728 | 1 | 24 | 25 | 161 |
| | | Oct. 13, 1999 | XR | | | | | | | | | | | |
| 180 | HOQBJ82 | PTA-845 | Uni-ZAP | 345 | 4344 | 1339 | 1942 | | 55 | 729 | 1 | 1 | 2 | 325 |
| | | Oct. 13, 1999 | XR | | | | | | | | | | | |
| 181 | HOSBY40 | 209551 | Uni-ZAP | 191 | 1145 | 1 | 1145 | 89 | 89 | 575 | 1 | 30 | 31 | 56 |
| | | Dec. 12, 1997 | XR | | | | | | | | | | | |
| 182 | HOSDJ25 | 209423 | Uni-ZAP | 192 | 2214 | 985 | 2214 | 1076 | 1076 | 576 | 1 | 18 | 19 | 40 |
| | | Oct. 30, 1997 | XR | | | | | | | | | | | |
| 182 | HOSDJ25 | 209423 | Uni-ZAP | 346 | 1258 | 1 | 1258 | 146 | 146 | 730 | 1 | 18 | 19 | 40 |
| | | Oct. 30, 1997 | XR | | | | | | | | | | | |
| 183 | HOUCQ17 | 209086 | Uni-ZAP | 193 | 4712 | 1 | 4693 | 508 | 508 | 577 | 1 | 51 | 52 | 967 |
| | | May 29, 1997 | XR | | | | | | | | | | | |
| 184 | HPEAD79 | 209244 | Uni-ZAP | 194 | 813 | 1 | 813 | 51 | 51 | 578 | 1 | 15 | 16 | 41 |
| | | Sep. 12, 1997 | XR | | | | | | | | | | | |
| 185 | HPIBO15 | 209563 | Uni-ZAP | 195 | 1739 | 1 | 1739 | 128 | 128 | 579 | 1 | 18 | 19 | 211 |
| | | Dec. 18, 1997 | XR | | | | | | | | | | | |
| 185 | HPIBO15 | 209563 | Uni-ZAP | 347 | 1739 | 1 | 1739 | 127 | 127 | 731 | 1 | 18 | 19 | 173 |
| | | Dec. 18, 1997 | XR | | | | | | | | | | | |
| 186 | HPJBI33 | 209889 | Uni-ZAP | 196 | 1677 | 1 | 1677 | 236 | 236 | 580 | 1 | 31 | 32 | 53 |
| | | May 22, 1998 | XR | | | | | | | | | | | |
| 187 | HPJBK12 | PTA-855 | Uni-ZAP | 197 | 2648 | 1 | 2648 | 126 | 126 | 581 | 1 | 18 | 19 | 48 |
| | | Oct. 18, 1999 | XR | | | | | | | | | | | |
| 187 | HPJBK12 | PTA-855 | Uni-ZAP | 348 | 538 | 1 | 538 | 119 | 119 | 732 | 1 | 18 | 19 | 48 |
| | | Oct. 18, 1999 | XR | | | | | | | | | | | |
| 187 | HPJBK12 | PTA-855 | Uni-ZAP | 349 | 1346 | 1 | 1346 | | 969 | 733 | 1 | | | 10 |
| | | Oct. 18, 1999 | XR | | | | | | | | | | | |
| 187 | HPJBK12 | PTA-855 | Uni-ZAP | 350 | 912 | 1 | 912 | 509 | 509 | 734 | 1 | | | 4 |
| | | Oct. 18, 1999 | XR | | | | | | | | | | | |
| 188 | HPJCL22 | PTA-2071 | Uni-ZAP | 198 | 3107 | 1 | 3107 | 86 | 86 | 582 | 1 | 35 | 36 | 80 |
| | | Jun. 09, 2000 | XR | | | | | | | | | | | |
| 188 | HPJCL22 | PTA-2071 | Uni-ZAP | 351 | 995 | 58 | 995 | 136 | 136 | 735 | 1 | 35 | 36 | 80 |
| | | Jun. 09, 2000 | XR | | | | | | | | | | | |
| 188 | HPJCL22 | PTA-2071 | Uni-ZAP | 352 | 751 | 183 | 751 | | 232 | 736 | 1 | 1 | 2 | 145 |
| | | Jun. 09, 2000 | XR | | | | | | | | | | | |
| 189 | HPMDK28 | 209628 | Uni-ZAP | 199 | 1084 | 1 | 1084 | 64 | 64 | 583 | 1 | 25 | 26 | 201 |
| | | Feb. 12, 1998 | XR | | | | | | | | | | | |
| 189 | HPMDK28 | 209628 | Uni-ZAP | 353 | 1177 | 1 | 1083 | 58 | 58 | 737 | 1 | 25 | 26 | 201 |
| | | Feb. 12, 1998 | XR | | | | | | | | | | | |
| 190 | HPRAL78 | 209195 | Uni-ZAP | 200 | 2072 | 1 | 2072 | 62 | 62 | 584 | 1 | 29 | 30 | 420 |
| | | Aug. 01, 1997 | XR | | | | | | | | | | | |
| 190 | HPRAL78 | 209195 | Uni-ZAP | 354 | 1775 | 1038 | 1775 | 70 | 70 | 738 | 1 | 29 | 30 | 392 |
| | | Aug. 01, 1997 | XR | | | | | | | | | | | |
| 190 | HPRAL78 | 209195 | Uni-ZAP | 355 | 866 | 128 | 866 | 148 | 148 | 739 | 1 | 42 | 43 | 63 |
| | | Aug. 01, 1997 | XR | | | | | | | | | | | |
| 191 | HRABA80 | 209889 | pCMVSport | 201 | 1251 | 1 | 1251 | 144 | 144 | 585 | 1 | 27 | 28 | 102 |
| | | May 22, 1998 | 3.0 | | | | | | | | | | | |
| 191 | HRABA80 | 209889 | pCMVSport | 356 | 1237 | 1 | 1237 | 130 | 130 | 740 | 1 | 27 | 28 | 102 |
| | | May 22, 1998 | 3.0 | | | | | | | | | | | |
| 192 | HRACD15 | 209852 | pCMVSport | 202 | 1539 | 24 | 1539 | 252 | 252 | 586 | 1 | 40 | 41 | 53 |
| | | May 07, 1998 | 3.0 | | | | | | | | | | | |
| 192 | HRACD15 | 209852 | pCMVSport | 357 | 1681 | 24 | 1453 | 252 | 252 | 741 | 1 | 40 | 41 | 53 |
| | | May 07, 1998 | 3.0 | | | | | | | | | | | |
| 193 | HRACJ35 | 209878 | pCMVSport | 203 | 2077 | 1 | 2077 | 132 | 132 | 587 | 1 | 24 | 25 | 472 |
| | | May 18, 1998 | 3.0 | | | | | | | | | | | |
| 193 | HRACJ35 | 209878 | pCMVSport | 358 | 1863 | 8 | 1863 | 99 | 99 | 742 | 1 | 24 | 25 | 472 |
| | | May 18, 1998 | 3.0 | | | | | | | | | | | |
| 193 | HRACJ35 | 209878 | pCMVSport | 359 | 1134 | 1 | 1134 | | 1 | 743 | 1 | 1 | 2 | 178 |
| | | May 18, 1998 | 3.0 | | | | | | | | | | | |
| 194 | HRGBL78 | PTA-841 | Uni-ZAP | 204 | 2108 | 1 | 2108 | 30 | 30 | 588 | 1 | 27 | 28 | 359 |
| | | Oct. 13, 1999 | XR | | | | | | | | | | | |
| 194 | HRGBL78 | PTA-841 | Uni-ZAP | 360 | 626 | 8 | 626 | 30 | 30 | 744 | 1 | 38 | 39 | 199 |
| | | Oct. 13, 1999 | XR | | | | | | | | | | | |
| 194 | HRGBL78 | PTA-841 | Uni-ZAP | 361 | 152 | 1 | 152 | | 11 | 745 | 1 | | | 2 |
| | | Oct. 13, 1999 | XR | | | | | | | | | | | |
| 194 | HRGBL78 | PTA-841 | Uni-ZAP | 362 | 1760 | 127 | 1760 | | 1048 | 746 | 1 | 10 | 11 | 32 |
| | | Oct. 13, 1999 | XR | | | | | | | | | | | |
| 195 | HROAJ39 | PTA-2069 | Uni-ZAP | 205 | 1146 | 224 | 1146 | 10 | 10 | 589 | 1 | 30 | 31 | 379 |
| | | Jun. 09, 2000 | XR | | | | | | | | | | | |
| 195 | HROAJ39 | PTA-2069 | Uni-ZAP | 363 | 880 | 1 | 880 | 31 | 31 | 747 | 1 | 15 | 16 | 283 |
| | | Jun. 09, 2000 | XR | | | | | | | | | | | |
| 195 | HROAJ39 | PTA-2069 | Uni-ZAP | 364 | 1106 | 224 | 1106 | 247 | 247 | 748 | 1 | 15 | 16 | 286 |
| | | Jun. 09, 2000 | XR | | | | | | | | | | | |
| 196 | HROBD68 | 203499 | Uni-ZAP | 206 | 1998 | 1 | 1998 | 122 | 122 | 590 | 1 | 22 | 23 | 48 |
| | | Dec. 01, 1998 | XR | | | | | | | | | | | |
| 197 | HSAWD74 | 209126 | Uni-ZAP | 207 | 970 | 106 | 970 | 142 | 142 | 591 | 1 | 26 | 27 | 142 |
| | | Jun. 19, 1997 | XR | | | | | | | | | | | |
| 197 | HSAWD74 | 209126 | Uni-ZAP | 365 | 646 | 1 | 646 | 122 | 122 | 749 | 1 | 29 | 30 | 45 |
| | | Jun. 19, 1997 | XR | | | | | | | | | | | |
| 198 | HSDEK49 | 209603 | Uni-ZAP | 208 | 1782 | 1 | 1782 | 60 | 60 | 592 | 1 | 19 | 20 | 399 |
| | | Jan. 29, 1998 | XR | | | | | | | | | | | |
| 198 | HSDEK49 | 209603 | Uni-ZAP | 366 | 1590 | 96 | 1590 | 126 | 126 | 750 | 1 | 21 | 22 | 305 |
| | | Jan. 29, 1998 | XR | | | | | | | | | | | |
| 199 | HSDFJ26 | 203648 | Uni-ZAP | 209 | 1205 | 23 | 1179 | 99 | 99 | 593 | 1 | 20 | 21 | 223 |
| | | Feb. 09, 1999 | XR | | | | | | | | | | | |
| 199 | HSDFJ26 | 203648 | Uni-ZAP | 367 | 1179 | 1 | 1179 | 99 | 99 | 751 | 1 | 19 | 20 | 72 |
| | | Feb. 09, 1999 | XR | | | | | | | | | | | |
| 200 | HSDJA15 | 203081 | Uni-ZAP | 210 | 1443 | 1 | 1443 | 247 | 247 | 594 | 1 | 20 | 21 | 152 |
| | | Jul. 30, 1998 | XR | | | | | | | | | | | |
| 201 | HSDJM31 | 209148 | Uni-ZAP | 211 | 561 | 1 | 561 | 351 | 351 | 595 | 1 | 25 | 26 | 40 |
| | | Jul. 17, 1997 | XR | | | | | | | | | | | |
| 202 | HSDSB09 | 209145 | pBluescript | 212 | 809 | 1 | 809 | 16 | 16 | 596 | 1 | 17 | 18 | 135 |
| | | Jul. 17, 1997 | | | | | | | | | | | | |
| 202 | HSDSB09 | 209145 | pBluescript | 368 | 819 | 1 | 819 | 22 | 22 | 752 | 1 | 17 | 18 | 121 |
| | | Jul. 17, 1997 | | | | | | | | | | | | |
| 203 | HSHAX21 | 209853 | Uni-ZAP | 213 | 1986 | 1 | 1986 | 177 | 177 | 597 | 1 | 13 | 14 | 72 |
| | | May 07, 1998 | XR | | | | | | | | | | | |
| 204 | HSIDJ81 | 209551 | Uni-ZAP | 214 | 1303 | 1 | 1303 | 8 | 8 | 598 | 1 | 22 | 23 | 58 |
| | | Dec. 12, 1997 | XR | | | | | | | | | | | |
| 205 | HSJBQ79 | 97924 | Uni-ZAP | 215 | 587 | 1 | 587 | 41 | 41 | 599 | 1 | 23 | 24 | 182 |
| | | Mar. 07, 1997 | XR | | | | | | | | | | | |
| 205 | HSJBQ79 | 97924 | Uni-ZAP | 369 | 1507 | 164 | 608 | 57 | 57 | 753 | 1 | 19 | 20 | 327 |
| | | Mar. 07, 1997 | XR | | | | | | | | | | | |
| 205 | HSJBQ79 | 97924 | Uni-ZAP | 370 | 586 | 4 | 586 | 35 | 35 | 754 | 1 | 23 | 24 | 184 |
| | | Mar. 07, 1997 | XR | | | | | | | | | | | |
| 206 | HSKDA27 | PTA-322 | Uni-ZAP | 216 | 4412 | 1 | 4412 | 786 | 786 | 600 | 1 | 24 | 25 | 950 |
| | | Jul. 09, 1999 | XR | | | | | | | | | | | |
| 206 | HSKDA27 | PTA-322 | Uni-ZAP | 371 | 1792 | 134 | 1792 | 127 | 127 | 755 | 1 | 21 | 22 | 509 |
| | | Jul. 09, 1999 | XR | | | | | | | | | | | |
| 206 | HSKDA27 | PTA-322 | Uni-ZAP | 372 | 1673 | 1 | 1673 | 12 | 12 | 756 | 1 | 21 | 22 | 554 |
| | | Jul. 09, 1999 | XR | | | | | | | | | | | |
| 207 | HSKGN81 | 97977 | pBluescript | 217 | 1907 | 151 | 1432 | 353 | 353 | 601 | 1 | 23 | 24 | 260 |
| | | Apr. 04, 1997 | | | | | | | | | | | | |
| | | 209082 | | | | | | | | | | | | |
| | | May 29, 1997 | | | | | | | | | | | | |
| 207 | HSKGN81 | 97977 | pBluescript | 373 | 2084 | 335 | 2084 | 537 | 537 | 757 | 1 | 18 | 19 | 23 |
| | | Apr. 04, 1997 | | | | | | | | | | | | |
| | | 209082 | | | | | | | | | | | | |
| | | May 29, 1997 | | | | | | | | | | | | |
| 208 | HSKNB56 | 209346 | pBluescript | 218 | 1334 | 449 | 1334 | 484 | 484 | 602 | 1 | 25 | 26 | 85 |
| | | Oct. 09, 1997 | | | | | | | | | | | | |
| 209 | HSNAD72 | 209139 | Uni-ZAP | 219 | 861 | 1 | 861 | 220 | 220 | 603 | 1 | 19 | 20 | 35 |
| | | Jul. 03, 1997 | XR | | | | | | | | | | | |
| 210 | HSNMC45 | 209300 | Uni-ZAP | 220 | 587 | 1 | 587 | 225 | 225 | 604 | 1 | 18 | 19 | 55 |
| | | Sep. 25, 1997 | XR | | | | | | | | | | | |
| 210 | HSNMC45 | 209300 | Uni-ZAP | 374 | 720 | 1 | 720 | 232 | 232 | 758 | 1 | 17 | 18 | 25 |
| | | Sep. 25, 1997 | XR | | | | | | | | | | | |
| 211 | HSQFP66 | 209126 | Uni-ZAP | 221 | 477 | 1 | 477 | 96 | 96 | 605 | 1 | 32 | 33 | 78 |
| | | Jun. 19, 1997 | XR | | | | | | | | | | | |
| 212 | HSRFZ57 | PTA-622 | Uni-ZAP | 222 | 1930 | 1 | 1925 | 82 | 82 | 606 | 1 | 18 | 19 | 41 |
| | | Sep. 02, 1999 | XR | | | | | | | | | | | |
| 213 | HSUBW09 | 209007 | Uni-ZAP | 223 | 1021 | 1 | 1021 | 153 | 153 | 607 | 1 | 31 | 32 | 56 |
| | | Apr. 28, 1997 | XR | | | | | | | | | | | |
| | | 209083 | | | | | | | | | | | | |
| | | Apr. 29, 1997 | | | | | | | | | | | | |
| 214 | HSVBU91 | 209603 | Uni-ZAP | 224 | 727 | 1 | 727 | 256 | 256 | 608 | 1 | 18 | 19 | 90 |
| | | Jan. 29, 1998 | XR | | | | | | | | | | | |
| 215 | HSXGI47 | PTA-499 | Uni-ZAP | 225 | 1256 | 1 | 1256 | 87 | 87 | 609 | 1 | 21 | 22 | 57 |
| | | Aug. 11, 1999 | XR | | | | | | | | | | | |
| 216 | HSYAZ63 | PTA-163 | pCMVSport | 226 | 3466 | 1655 | 3347 | 448 | 448 | 610 | 1 | 30 | 31 | 434 |
| | | Jun. 01, 1999 | 3.0 | | | | | | | | | | | |
| 216 | HSYAZ63 | PTA-163 | pCMVSport | 375 | 1707 | 1 | 1707 | 215 | 215 | 759 | 1 | 21 | 22 | 40 |
| | | Jun. 01, 1999 | 3.0 | | | | | | | | | | | |
| 217 | HSYBG37 | 209463 | pCMVSport | 227 | 1238 | 1 | 1238 | 47 | 47 | 611 | 1 | 24 | 25 | 305 |
| | | Nov. 14, 1997 | 3.0 | | | | | | | | | | | |
| 217 | HSYBG37 | 209463 | pCMVSport | 376 | 1239 | 1 | 1239 | 48 | 48 | 760 | 1 | 24 | 25 | 305 |
| | | Nov. 14, 1997 | 3.0 | | | | | | | | | | | |
| 218 | HTADW91 | PTA-1543 | Uni-ZAP | 228 | 1481 | 54 | 1481 | 59 | 59 | 612 | 1 | 32 | 33 | 364 |
| | | Mar. 21, 2000 | XR | | | | | | | | | | | |
| 219 | HTAEE28 | PTA-843 | Uni-ZAP | 229 | 1341 | 1 | 1341 | 319 | 319 | 613 | 1 | 33 | 34 | 282 |
| | | Oct. 13, 1999 | XR | | | | | | | | | | | |
| 219 | HTAEE28 | PTA-843 | Uni-ZAP | 377 | 738 | 159 | 738 | 372 | 372 | 761 | 1 | 33 | 34 | 122 |
| | | Oct. 13, 1999 | XR | | | | | | | | | | | |
| 219 | HTAEE28 | PTA-843 | Uni-ZAP | 378 | 935 | 1 | 807 | | 124 | 762 | 1 | 1 | 2 | 216 |
| | | Oct. 13, 1999 | XR | | | | | | | | | | | |
| 220 | HTDAF28 | 97974 | pSport1 | 230 | 912 | 1 | 912 | 38 | 38 | 614 | 1 | 22 | 23 | 87 |
| | | Apr. 04, 1997 | | | | | | | | | | | | |
| | | 209080 | | | | | | | | | | | | |
| | | May 29, 1997 | | | | | | | | | | | | |
| 221 | HTECC05 | 209877 | Uni-ZAP | 231 | 839 | 1 | 839 | 13 | 13 | 615 | 1 | 15 | 16 | 178 |
| | | May 18, 1998 | XR | | | | | | | | | | | |
| 221 | HTECC05 | 209877 | Uni-ZAP | 379 | 871 | 1 | 871 | 21 | 21 | 763 | 1 | 15 | 16 | 127 |
| | | May 18, 1998 | XR | | | | | | | | | | | |
| 221 | HTECC05 | 209877 | Uni-ZAP | 380 | 881 | 1 | 881 | 27 | 27 | 764 | 1 | 15 | 16 | 164 |
| | | May 18, 1998 | XR | | | | | | | | | | | |
| 222 | HTEEB42 | 97922 | Uni-ZAP | 232 | 1022 | 20 | 1022 | 59 | 59 | 616 | 1 | 22 | 23 | 298 |
| | | Mar. 07, 1997 | XR | | | | | | | | | | | |
| | | 209070 | | | | | | | | | | | | |
| | | May 22, 1997 | | | | | | | | | | | | |
| 223 | HTEFU65 | 209324 | Uni-ZAP | 233 | 1028 | 1 | 1028 | 231 | 231 | 617 | 1 | 24 | 25 | 46 |
| | | Oct. 02, 1997 | XR | | | | | | | | | | | |
| 224 | HTEGA76 | 97958 | Uni-ZAP | 234 | 450 | 1 | 450 | 90 | 90 | 618 | 1 | 43 | 44 | 65 |
| | | Mar. 13, 1997 | XR | | | | | | | | | | | |
| | | 209072 | | | | | | | | | | | | |
| | | May 22, 1997 | | | | | | | | | | | | |
| 225 | HTEJN13 | 97958 | Uni-ZAP | 235 | 1094 | 1 | 1094 | 156 | 156 | 619 | 1 | 15 | 16 | 208 |
| | | Mar. 13, 1997 | XR | | | | | | | | | | | |
| | | 209072 | | | | | | | | | | | | |
| | | May 22, 1997 | | | | | | | | | | | | |
| 225 | HTEJN13 | 97958 | Uni-ZAP | 381 | 1147 | 1 | 1147 | 163 | 163 | 765 | 1 | 15 | 16 | 159 |
| | | Mar. 13, 1997 | XR | | | | | | | | | | | |
| | | 209072 | | | | | | | | | | | | |
| | | May 22, 1997 | | | | | | | | | | | | |
| 225 | HTEJN13 | 97958 | Uni-ZAP | 382 | 1134 | 1 | 1134 | 155 | 155 | 766 | 1 | 19 | 20 | 71 |
| | | Mar. 13, 1997 | XR | | | | | | | | | | | |
| | | 209072 | | | | | | | | | | | | |
| | | May 22, 1997 | | | | | | | | | | | | |
| 226 | HTELP17 | 203648 | Uni-ZAP | 236 | 808 | 1 | 808 | 164 | 164 | 620 | 1 | 20 | 21 | 44 |
| | | Feb. 09, 1999 | XR | | | | | | | | | | | |
| 227 | HTELS08 | PTA-1544 | Uni-ZAP | 237 | 1898 | 1 | 1898 | 15 | 15 | 621 | 1 | 17 | 18 | 158 |
| | | Mar. 21, 2000 | XR | | | | | | | | | | | |
| 228 | HTLEP53 | 209641 | Uni-ZAP | 238 | 818 | 1 | 818 | 73 | 73 | 622 | 1 | 43 | 44 | 101 |
| | | Feb. 25, 1998 | XR | | | | | | | | | | | |
| 229 | HTOIY21 | 209852 | Uni-ZAP | 239 | 1558 | 1 | 1558 | 91 | 91 | 623 | 1 | 14 | 15 | 231 |
| | | May 07, 1998 | XR | | | | | | | | | | | |
| 230 | HTPCS72 | 209423 | Uni-ZAP | 240 | 3435 | 2141 | 3431 | 2365 | 2365 | 624 | 1 | 29 | 30 | 71 |
| | | Oct. 30, 1997 | XR | | | | | | | | | | | |
| 230 | HTPCS72 | 209423 | Uni-ZAP | 383 | 1598 | 306 | 1598 | 530 | 530 | 767 | 1 | 29 | 30 | 71 |
| | | Oct. 30, 1997 | XR | | | | | | | | | | | |
| 231 | HTPIH83 | PTA-871 | Uni-ZAP | 241 | 1481 | 1 | 1481 | 118 | 118 | 625 | 1 | 24 | 25 | 230 |
| | | Oct. 26, 1999 | XR | | | | | | | | | | | |
| 231 | HTPIH83 | PTA-871 | Uni-ZAP | 384 | 530 | 1 | 530 | 111 | 111 | 768 | 1 | 24 | 25 | 140 |
| | | Oct. 26, 1999 | XR | | | | | | | | | | | |
| 231 | HTPIH83 | PTA-871 | Uni-ZAP | 385 | 1046 | 359 | 1046 | | 96 | 769 | 1 | 1 | 2 | 86 |
| | | Oct. 26, 1999 | XR | | | | | | | | | | | |
| 232 | HTSEW17 | 209138 | pBluescript | 242 | 652 | 1 | 652 | 170 | 170 | 626 | 1 | 34 | 35 | 37 |
| | | Jul. 03, 1997 | | | | | | | | | | | | |
| 233 | HTTBI76 | 209641 | Uni-ZAP | 243 | 1711 | 1 | 1711 | 133 | 133 | 627 | 1 | 22 | 23 | 133 |
| | | Feb. 25, 1998 | XR | | | | | | | | | | | |
| 234 | HTTBS64 | PTA-841 | Uni-ZAP | 244 | 2058 | 1 | 2058 | 95 | 95 | 628 | 1 | 17 | 18 | 42 |
| | | Oct. 13, 1999 | XR | | | | | | | | | | | |
| 234 | HTTBS64 | PTA-841 | Uni-ZAP | 386 | 819 | 1 | 819 | 100 | 100 | 770 | 1 | 17 | 18 | 42 |
| | | Oct. 13, 1999 | XR | | | | | | | | | | | |
| 234 | HTTBS64 | PTA-841 | Uni-ZAP | 387 | 501 | 1 | 501 | | 175 | 771 | 1 | 1 | 2 | 76 |
| | | Oct. 13, 1999 | XR | | | | | | | | | | | |
| 235 | HTWKE60 | 209651 | Lambda | 245 | 407 | 1 | 407 | 185 | 185 | 629 | 1 | 25 | 26 | 44 |
| | | Mar. 04, 1998 | ZAP II | | | | | | | | | | | |
| 236 | HTXAJ12 | 209423 | Uni-ZAP | 246 | 675 | 1 | 675 | 91 | 91 | 630 | 1 | 18 | 19 | 111 |
| | | Oct. 30, 1997 | XR | | | | | | | | | | | |
| 236 | HTXAJ12 | 209423 | Uni-ZAP | 388 | 675 | 1 | 675 | 91 | 91 | 772 | 1 | 18 | 19 | 111 |
| | | Oct. 30, 1997 | XR | | | | | | | | | | | |
| 237 | HTXJM03 | 209580 | Uni-ZAP | 247 | 2398 | 211 | 2398 | 328 | 328 | 631 | 1 | 18 | 19 | 56 |
| | | Jan. 14, 1998 | XR | | | | | | | | | | | |
| 238 | HTXKF95 | PTA-622 | Uni-ZAP | 248 | 975 | 170 | 966 | 421 | 421 | 632 | 1 | 28 | 29 | 78 |
| | | Sep. 02, 1999 | XR | | | | | | | | | | | |
| 238 | HTXKF95 | PTA-622 | Uni-ZAP | 389 | 884 | 79 | 875 | 330 | 330 | 773 | 1 | 28 | 29 | 78 |
| | | Sep. 02, 1999 | XR | | | | | | | | | | | |
| 239 | HTXON32 | 203648 | Uni-ZAP | 249 | 1505 | 1 | 1505 | 72 | 72 | 633 | 1 | 22 | 23 | 52 |
| | | Feb. 09, 1999 | XR | | | | | | | | | | | |
| 240 | HUFCJ30 | 209641 | pSport1 | 250 | 868 | 1 | 868 | 123 | 123 | 634 | 1 | 29 | 30 | 50 |
| | | Feb. 25, 1998 | | | | | | | | | | | | |
| 241 | HUVEB53 | 209603 | Uni-ZAP | 251 | 1502 | 1 | 1502 | 14 | 14 | 635 | 1 | 20 | 21 | 45 |
| | | Jan. 29, 1998 | XR | | | | | | | | | | | |
| 242 | HWAAD63 | 203570 | pCMVSport | 252 | 3308 | 1 | 3308 | 322 | 322 | 636 | 1 | 30 | 31 | 168 |
| | | Jan. 11, 1999 | 3.0 | | | | | | | | | | | |
| 242 | HWAAD63 | 203570 | pCMVSport | 390 | 3306 | 1 | 3306 | 322 | 322 | 774 | 1 | 30 | 31 | 53 |
| | | Jan. 11, 1999 | 3.0 | | | | | | | | | | | |
| 242 | HWAAD63 | 203570 | pCMVSport | 391 | 2194 | 1 | 2194 | 312 | 312 | 775 | 1 | 30 | 31 | 169 |
| | | Jan. 11, 1999 | 3.0 | | | | | | | | | | | |
| 243 | HWADJ89 | PTA-1543 | pCMVSport | 253 | 1769 | 529 | 1769 | 581 | 581 | 637 | 1 | 1 | 2 | 43 |
| | | Mar. 21, 2000 | 3.0 | | | | | | | | | | | |
| 244 | HWBCP79 | 209641 | pCMVSport | 254 | 1138 | 1 | 1138 | 243 | 243 | 638 | 1 | 21 | 22 | 105 |
| | | Feb. 25, 1998 | 3.0 | | | | | | | | | | | |
| 244 | HWBCP79 | 209641 | pCMVSport | 392 | 1138 | 1 | 1138 | 233 | 233 | 776 | 1 | 21 | 22 | 105 |
| | | Feb. 25, 1998 | 3.0 | | | | | | | | | | | |
| 245 | HWBEM18 | PTA-868 | pCMVSport | 255 | 6729 | 1 | 6729 | 75 | 75 | 639 | 1 | 25 | 26 | 1887 |
| | | Oct. 26, 1999 | 3.0 | | | | | | | | | | | |
| 245 | HWBEM18 | PTA-868 | pCMVSport | 393 | 3599 | 1 | 3599 | 65 | 65 | 777 | 1 | 25 | 26 | 886 |
| | | Oct. 26, 1999 | 3.0 | | | | | | | | | | | |
| 245 | HWBEM18 | PTA-868 | pCMVSport | 394 | 2924 | 1 | 2496 | | 1 | 778 | 1 | 1 | 2 | 498 |
| | | Oct. 26, 1999 | 3.0 | | | | | | | | | | | |
| 246 | HWBFX31 | PTA-1543 | pCMVSport | 256 | 1677 | 1 | 1677 | 271 | 271 | 640 | 1 | 1 | 2 | 52 |
| | | Mar. 21, 2000 | 3.0 | | | | | | | | | | | |
| 247 | HWHGZ51 | PTA-499 | pCMVSport | 257 | 1699 | 1 | 1699 | 33 | 33 | 641 | 1 | 30 | 31 | 346 |
| | | Aug. 11, 1999 | 3.0 | | | | | | | | | | | |
| 248 | HWTBK81 | 209138 | Uni-ZAP | 258 | 637 | 78 | 635 | 139 | 139 | 642 | 1 | 23 | 24 | 155 |
| | | Jul. 03, 1997 | XR | | | | | | | | | | | |
| 249 | HAGAI85 | 97922 | Uni-ZAP | 259 | 1752 | 52 | 1752 | 166 | 166 | 653 | 1 | 23 | 24 | 30 |
| | | Mar. 07, 1997 | XR | | | | | | | | | | | |
| | | 209070 | | | | | | | | | | | | |
| | | May 22, 1997 | | | | | | | | | | | | |
| 250 | HOFOC33 | PTA-848 | pCMVSport | 260 | 1669 | 1 | 1669 | 76 | 76 | 654 | 1 | 21 | 22 | 363 |
| | | Oct. 13, 1999 | 2.0 | | | | | | | | | | | |
| 251 | HSDEZ20 | 209852 | Uni-ZAP | 261 | 795 | 1 | 795 | 58 | 58 | 655 | 1 | 41 | 42 | 122 |
| | | May 07, 1998 | XR | | | | | | | | | | | |

Table 1B (Comprised of Tables 1B.1 and 1B.2)

[0096] The first column in Table 1B.1 and Table 1B.2 provides the gene number in the application corresponding to the clone identifier. The second column in Table 1B.1 and Table 1B.2 provides a unique “Clone ID:” for the cDNA clone related to each contig sequence disclosed in Table 1B.1 and Table 1B.2. This clone ID references the cDNA clone which contains at least the 5′ most sequence of the assembled contig and at least a portion of SEQ ID NO:X as determined by directly sequencing the referenced clone. The referenced clone may have more sequence than described in the sequence listing or the clone may have less. In the vast majority of cases, however, the clone is believed to encode a full-length polypeptide. In the case where a clone is not full-length, a full-length cDNA can be obtained by methods described elsewhere herein. The third column in Table 1B.1 and Table 1B.2 provides a unique “Contig ID” identification for each contig sequence. The fourth column in Table 1B.1 and Table 1B.2 provides the “SEQ ID NO:” identifier for each of the contig polynucleotide sequences disclosed in Table 1B.

[0097] Table 1B.1

[0098] The fifth column in Table 1B.1, “ORF (From-To)”, provides the location (i.e., nucleotide position numbers) within the polynucleotide sequence “SEQ ID NO:X” that delineate the preferred open reading frame (ORF) shown in the sequence listing and referenced in Table 1B.1, column 6, as SEQ ID NO:Y. Where the nucleotide position number “To” is lower than the nucleotide position number “From”, the preferred ORF is the reverse complement of the referenced polynucleotide sequence. The sixth column in Table 1B.1 provides the corresponding SEQ ID NO:Y for the polypeptide sequence encoded by the preferred ORF delineated in column 5. In one embodiment, the invention provides an amino acid sequence comprising, or alternatively consisting of, a polypeptide encoded by the portion of SEQ ID NO:X delineated by “ORF (From-To)”. Also provided are polynucleotides encoding such amino acid sequences and the complementary strand thereto. Column 7 in Table 1B.1 lists residues comprising epitopes contained in the polypeptides encoded by the preferred ORF (SEQ ID NO:Y), as predicted using the algorithm of Jameson and Wolf, (1988) Comp. Appl. Biosci. 4:181-186. The Jameson-Wolf antigenic analysis was performed using the computer program PROTEAN (Version 3.11 for the Power MacIntosh, DNASTAR, Inc., 1228 South Park Street Madison, Wis.). In specific embodiments, polypeptides of the invention comprise, or alternatively consist of, at least one, two, three, four, five or more of the predicted epitopes as described in Table 1B. It will be appreciated that depending on the analytical criteria used to predict antigenic determinants, the exact address of the determinant may vary slightly.

[0099] Column 8 in Table 1B.1 provides a chromosomal map location for certain polynucleotides of the invention. Chromosomal location was determined by finding exact matches to EST and cDNA sequences contained in the NCBI (National Center for Biotechnology Information) UniGene database. Each sequence in the UniGene database is assigned to a “cluster”; all of the ESTs, cDNAs, and STSs in a cluster are believed to be derived from a single gene. Chromosomal mapping data is often available for one or more sequence(s) in a UniGene cluster; this data (if consistent) is then applied to the cluster as a whole. Thus, it is possible to infer the chromosomal location of a new polynucleotide sequence by determining its identity with a mapped UniGene cluster.

[0100] A modified version of the computer program BLASTN (Altshul, et al., J. Mol. Biol. 215:403-410 (1990), and Gish, and States, Nat. Genet. 3:266-272) (1993) was used to search the UniGene database for EST or cDNA sequences that contain exact or near-exact matches to a polynucleotide sequence of the invention (the ‘Query’). A sequence from the UniGene database (the ‘Subject’) was said to be an exact match if it contained a segment of 50 nucleotides in length such that 48 of those nucleotides were in the same order as found in the Query sequence. If all of the matches that met this criteria were in the same UniGene cluster, and mapping data was available for this cluster, it is indicated in Table 1B under the heading “Cytologic Band”. Where a cluster had been further localized to a distinct cytologic band, that band is disclosed; where no banding information was available, but the gene had been localized to a single chromosome, the chromosome is disclosed.

[0101] Once a presumptive chromosomal location was determined for a polynucleotide of the invention, an associated disease locus was identified by comparison with a database of diseases which have been experimentally associated with genetic loci. The database used was the Morbid Map, derived from OMIM™ and National Center for Biotechnology Information, National Library of Medicine (Bethesda, Md.) 2000. If the putative chromosomal location of a polynucleotide of the invention (Query sequence) was associated with a disease in the Morbid Map database, an OMIM reference identification number was noted in column 9, Table 1B.1, labelled “OMIM Disease Reference(s). Table 5 is a key to the OMIM reference identification numbers (column 1), and provides a description of the associated disease in Column 2.

[0102] Table 1B.2

[0103] Column 5, in Table 1B.2, provides an expression profile and library code:count for each of the contig sequences (SEQ ID NO:X) disclosed in Table 1B, which can routinely be combined with the information provided in Table 4 and used to determine the tissues, cells, and/or cell line libraries which predominantly express the polynucleotides of the invention. The first number in Table 1B.2, column 5 (preceding the colon), represents the tissue/cell source identifier code corresponding to the code and description provided in Table 4. The second number in column 5 (following the colon) represents the number of times a sequence corresponding to the reference polynucleotide sequence was identified in the corresponding tissue/cell source. Those tissue/cell source identifier codes in which the first two letters are “AR” designate information generated using DNA array technology. Utilizing this technology, cDNAs were amplified by PCR and then transferred, in duplicate, onto the array. Gene expression was assayed through hybridization of first strand cDNA probes to the DNA array. cDNA probes were generated from total RNA extracted from a variety of different tissues and cell lines. Probe synthesis was performed in the presence of ³³P dCTP, using oligo (dT) to prime reverse transcription. After hybridization, high stringency washing conditions were employed to remove non-specific hybrids from the array. The remaining signal, emanating from each gene target, was measured using a Phosphorimager. Gene expression was reported as Phosphor Stimulating Luminescence (PSL) which reflects the level of phosphor signal generated from the probe hybridized to each of the gene targets represented on the array. A local background signal subtraction was performed before the total signal generated from each array was used to normalize gene expression between the different hybridizations. The value presented after “[array code]:” represents the mean of the duplicate values, following background subtraction and probe normalization. One of skill in the art could routinely use this information to identify normal and/or diseased tissue(s) which show a predominant expression pattern of the corresponding polynucleotide of the invention or to identify polynucleotides which show predominant and/or specific tissue and/or cell expression.

LENGTHY TABLE REFERENCED HERE
US20070055056A1-20070308-T00001
Please refer to the end of the specification for access instructions.

[0104] Table 1C summarizes additional polynucleotides encompassed by the invention (including cDNA clones related to the sequences (Clone ID:), contig sequences (contig identifier (Contig ID:) contig nucleotide sequence identifiers (SEQ ID NO:X)), and genomic sequences (SEQ ID NO:B). The first column provides a unique clone identifier, “Clone ID:”, for a cDNA clone related to each contig sequence. The second column provides the sequence identifier, “SEQ ID NO:X”, for each contig sequence. The third column provides a unique contig identifier, “Contig ID:” for each contig sequence. The fourth column, provides a BAC identifier “BAC ID NO:A” for the BAC clone referenced in the corresponding row of the table. The fifth column provides the nucleotide sequence identifier, “SEQ ID NO:B” for a fragment of the BAC clone identified in column four of the corresponding row of the table. The sixth column, “Exon From-To”, provides the location (i.e., nucleotide position numbers) within the polynucleotide sequence of SEQ ID NO:B which delineate certain polynucleotides of the invention that are also exemplary members of polynucleotide sequences that encode polypeptides of the invention (e.g., polypeptides containing amino acid sequences encoded by the polynucleotide sequences delineated in column six, and fragments and variants thereof).

TABLE 1C

| cDNA Clone | SEQ ID | CONTIG | BAC | SEQ ID | EXON |
|---|---|---|---|---|---|
| ID | NO: X | ID: | ID: A | NO: B | From-To |
| HAUAI83 | 30 | 639009 | AC010422 | 781 | 1-326 |
| | | | | | 1552-2084 |
| | | | | | 2162-2261 |
| | | | | | 2300-2427 |
| | | | | | 4485-5868 |
| | | | | | 5948-6362 |
| | | | | | 7914-8017 |
| | | | | | 8569-8681 |
| | | | | | 8765-8875 |
| | | | | | 8968-9037 |
| | | | | | 9284-9499 |
| | | | | | 9742-9910 |
| | | | | | 10837-11187 |
| | | | | | 11271-11321 |
| | | | | | 11554-11707 |
| | | | | | 11783-12766 |
| | | | | | 12866-13225 |
| | | | | | 13256-13827 |
| | | | | | 14284-14367 |
| | | | | | 14890-15090 |
| HAUAI83 | 30 | 639009 | AC018761 | 782 | 1-326 |
| | | | | | 1176-1284 |
| | | | | | 1552-2084 |
| | | | | | 2162-2261 |
| | | | | | 2300-2426 |
| | | | | | 4485-5868 |
| | | | | | 5948-6362 |
| | | | | | 8569-8681 |
| | | | | | 8765-8875 |
| | | | | | 8968-9037 |
| | | | | | 9284-9499 |
| | | | | | 9742-9910 |
| | | | | | 10317-10501 |
| | | | | | 10837-11187 |
| | | | | | 11271-11321 |
| | | | | | 11554-11707 |
| | | | | | 11783-12766 |
| | | | | | 12866-13225 |
| | | | | | 13256-13827 |
| | | | | | 14284-14367 |
| | | | | | 14890-15090 |
| HAUAI83 | 30 | 639009 | AC010422 | 783 | 1-315 |
| | | | | | 2004-2289 |
| | | | | | 2650-2741 |
| | | | | | 3554-3830 |
| HAUAI83 | 30 | 639009 | AC010422 | 784 | 1-202 |
| | | | | | 938-1047 |
| | | | | | 1219-1395 |
| | | | | | 1758-1956 |
| | | | | | 2907-3429 |
| | | | | | 3792-3935 |
| | | | | | 5366-5485 |
| | | | | | 6391-6688 |
| | | | | | 6899-7269 |
| | | | | | 7890-8316 |
| | | | | | 8400-8524 |
| | | | | | 8607-8682 |
| | | | | | 8824-8999 |
| | | | | | 9190-9302 |
| | | | | | 9691-9796 |
| | | | | | 10106-10177 |
| | | | | | 10571-11051 |
| | | | | | 11164-11490 |
| | | | | | 12565-12696 |
| | | | | | 13364-13501 |
| | | | | | 13964-14592 |
| | | | | | 14740-15540 |
| | | | | | 15610-15798 |
| | | | | | 15947-16642 |
| | | | | | 16717-16832 |
| | | | | | 16968-17408 |
| | | | | | 17521-17612 |
| | | | | | 18331-18579 |
| | | | | | 19120-19303 |
| | | | | | 19358-19514 |
| | | | | | 19599-19702 |
| | | | | | 20003-20245 |
| HAUAI83 | 30 | 639009 | AC018761 | 785 | 1-202 |
| | | | | | 938-1047 |
| | | | | | 1219-1395 |
| | | | | | 1758-1956 |
| | | | | | 2907-3429 |
| | | | | | 3792-3935 |
| | | | | | 5366-5485 |
| | | | | | 6391-6688 |
| | | | | | 6899-7269 |
| | | | | | 7591-7711 |
| | | | | | 7890-8316 |
| | | | | | 8400-8524 |
| | | | | | 8607-8682 |
| | | | | | 8749-9073 |
| | | | | | 9190-9302 |
| | | | | | 9691-9796 |
| HAUAI83 | 30 | 639009 | AC018761 | 786 | 1-82 |
| | | | | | 128-293 |
| | | | | | 1178-1447 |
| | | | | | 1986-2278 |
| | | | | | 2457-2711 |
| | | | | | 3543-3844 |
| HBINS58 | 35 | 1352386 | AL096774 | 787 | 1-1023 |
| | | | | | 2010-2239 |
| | | | | | 2581-2962 |
| | | | | | 3153-3223 |
| | | | | | 3324-3493 |
| | | | | | 3973-4126 |
| HBINS58 | 35 | 1352386 | AL096774 | 788 | 1-341 |
| HBINS58 | 35 | 1352386 | AL096774 | 789 | 1-142 |
| HCE3G69 | 40 | 728432 | AC068946 | 790 | 1-108 |
| | | | | | 1186-1324 |
| | | | | | 1746-1835 |
| | | | | | 2138-2284 |
| | | | | | 2448-2545 |
| | | | | | 2718-2861 |
| | | | | | 3091-5889 |
| HCE3G69 | 40 | 728432 | AC068946 | 791 | 1-191 |
| HCE3G69 | 40 | 728432 | AC068946 | 792 | 1-686 |
| HCEFB80 | 42 | 1143407 | AL022327 | 793 | 1-2271 |
| | | | | | 3506-3658 |
| | | | | | 4643-4810 |
| | | | | | 9039-9164 |
| | | | | | 9382-9509 |
| | | | | | 10587-10720 |
| | | | | | 11135-11195 |
| | | | | | 11265-11716 |
| | | | | | 14644-15466 |
| | | | | | 17451-17526 |
| | | | | | 18012-18114 |
| | | | | | 20530-20632 |
| | | | | | 20957-21009 |
| | | | | | 23696-23785 |
| | | | | | 25338-25575 |
| | | | | | 25969-26166 |
| HCNDR47 | 47 | 1016919 | AL122003 | 794 | 1-236 |
| | | | | | 531-696 |
| | | | | | 787-817 |
| | | | | | 863-4508 |
| | | | | | 5158-5744 |
| | | | | | 6949-7029 |
| HCNDR47 | 47 | 1016919 | AL122003 | 795 | 1-888 |
| | | | | | 1304-2003 |
| | | | | | 2830-3284 |
| | | | | | 3719-4571 |
| | | | | | 4618-5268 |
| | | | | | 6131-6557 |
| | | | | | 8947-9033 |
| | | | | | 9058-9726 |
| | | | | | 14176-14480 |
| | | | | | 18456-18915 |
| | | | | | 18960-19871 |
| | | | | | 22365-22454 |
| | | | | | 23082-23248 |
| | | | | | 28058-28215 |
| HDPGT01 | 61 | 771583 | AC020978 | 796 | 1-180 |
| | | | | | 2776-2899 |
| | | | | | 3916-4077 |
| | | | | | 4296-4335 |
| | | | | | 4436-4632 |
| | | | | | 4895-5181 |
| | | | | | 8153-8246 |
| | | | | | 9547-9666 |
| | | | | | 9907-10007 |
| | | | | | 10370-10618 |
| | | | | | 10788-11046 |
| | | | | | 11926-13423 |
| | | | | | 13465-13494 |
| | | | | | 13764-15689 |
| HDPGT01 | 61 | 771583 | AC020978 | 797 | 1-384 |
| HDPSB18 | 67 | 1043263 | AL355512 | 798 | 1-2572 |
| | | | | | 3049-3871 |
| HDPSB18 | 67 | 1043263 | AC006176 | 799 | 1-2571 |
| | | | | | 3048-3872 |
| HDPSB18 | 67 | 1043263 | AL355512 | 800 | 1-280 |
| HDPXY01 | 74 | 879048 | AL354000 | 801 | 1-1319 |
| | | | | | 4848-4975 |
| | | | | | 5229-5600 |
| | | | | | 6561-6654 |
| HDPXY01 | 74 | 879048 | AL035362 | 802 | 1-1316 |
| | | | | | 4844-4971 |
| | | | | | 5225-5596 |
| | | | | | 6557-6650 |
| HDPXY01 | 74 | 879048 | AL354000 | 803 | 1-460 |
| HDPXY01 | 74 | 879048 | AL354000 | 804 | 1-400 |
| HDPXY01 | 74 | 879048 | AL035362 | 805 | 1-400 |
| HDPXY01 | 74 | 879048 | AL035362 | 806 | 1-460 |
| HFIIN69 | 93 | 1011487 | AC027797 | 807 | 1-1438 |
| HFIIN69 | 93 | 1011487 | AC027797 | 808 | 1-329 |
| HHBCS39 | 104 | 1003028 | AL390960 | 809 | 1-2979 |
| HHBCS39 | 104 | 1003028 | AL358992 | 810 | 1-2983 |
| HHBCS39 | 104 | 1003028 | AL358992 | 811 | 1-207 |
| HHGCG53 | 110 | 340818 | AC024037 | 812 | 1-518 |
| HHGCM76 | 111 | 662329 | AC003665 | 813 | 1-70 |
| | | | | | 304-609 |
| | | | | | 900-1090 |
| | | | | | 1240-1835 |
| | | | | | 2272-2490 |
| | | | | | 2581-3598 |
| HHGCM76 | 111 | 662329 | AC003665 | 814 | 1-580 |
| | | | | | 851-995 |
| | | | | | 1224-1296 |
| | | | | | 1314-1663 |
| | | | | | 1930-1975 |
| | | | | | 2724-2905 |
| | | | | | 2968-3098 |
| | | | | | 3283-3328 |
| | | | | | 5121-5230 |
| | | | | | 5331-5689 |
| HJACG30 | 116 | 895505 | AC018512 | 815 | 1-776 |
| HJACG30 | 116 | 895505 | AC022305 | 816 | 1-878 |
| HJACG30 | 116 | 895505 | AC002518 | 817 | 1-150 |
| HLTIP94 | 137 | 1087335 | AC007431 | 818 | 1-1299 |
| HLTIP94 | 137 | 1087335 | AC007431 | 819 | 1-330 |
| HMSDL37 | 154 | 973996 | AC012086 | 820 | 1-3328 |
| HMSDL37 | 154 | 973996 | AC018811 | 821 | 1-3051 |
| HMSDL37 | 154 | 973996 | AC018494 | 822 | 1-3029 |
| HMSDL37 | 154 | 973996 | AC012086 | 823 | 1-224 |
| HMSDL37 | 154 | 973996 | AC012086 | 824 | 1-468 |
| HMSDL37 | 154 | 973996 | AC018811 | 825 | 1-222 |
| HMSDL37 | 154 | 973996 | AC018811 | 826 | 1-468 |
| HMSDL37 | 154 | 973996 | AC018494 | 827 | 1-224 |
| HMSDL37 | 154 | 973996 | AC018494 | 828 | 1-1854 |
| HNGOI12 | 172 | 1041375 | AC003675 | 829 | 1-2128 |
| HNGOI12 | 172 | 1041375 | AC001228 | 830 | 1-2129 |
| HNGOI12 | 172 | 1041375 | AC013791 | 831 | 1-2132 |
| HNHFM14 | 174 | 664507 | AC020552 | 832 | 1-290 |
| HNHFM14 | 174 | 664507 | AC020552 | 833 | 1-96 |
| HNTSY18 | 183 | 1041383 | AC004877 | 834 | 1-175 |
| | | | | | 342-474 |
| | | | | | 573-1883 |
| | | | | | 2536-2632 |
| | | | | | 2831-2894 |
| | | | | | 2999-3231 |
| | | | | | 5032-5164 |
| | | | | | 6664-6820 |
| | | | | | 7288-7881 |
| HNTSY18 | 183 | 1041383 | AC004877 | 835 | 1-42 |
| | | | | | 1197-1333 |
| | | | | | 1575-1698 |
| | | | | | 1936-1984 |
| | | | | | 2246-2304 |
| HOHBY44 | 189 | 873264 | AC074201 | 836 | 1-5280 |
| | | | | | 5527-5989 |
| | | | | | 7392-7421 |
| HOHBY44 | 189 | 873264 | AC074201 | 837 | 1-298 |
| HPJBK12 | 197 | 1011467 | AC022033 | 838 | 1-2649 |
| HPJBK12 | 197 | 1011467 | AC013541 | 839 | 1-2649 |
| HPJBK12 | 197 | 1011467 | AC022033 | 840 | 1-190 |
| HPJBK12 | 197 | 1011467 | AC013541 | 841 | 1-190 |
| HPJCL22 | 198 | 1146674 | AC037447 | 842 | 1-102 |
| | | | | | 373-826 |
| | | | | | 995-1315 |
| | | | | | 1450-1567 |
| | | | | | 2189-2515 |
| | | | | | 2599-2778 |
| | | | | | 3138-4132 |
| | | | | | 4537-4681 |
| | | | | | 4864-4998 |
| | | | | | 5144-5324 |
| | | | | | 5394-6211 |
| | | | | | 6816-6941 |
| | | | | | 7472-7647 |
| | | | | | 7791-8885 |
| | | | | | 9056-9368 |
| | | | | | 9506-9733 |
| | | | | | 9799-10100 |
| | | | | | 10277-10988 |
| | | | | | 11213-11751 |
| | | | | | 11783-11838 |
| | | | | | 11875-12474 |
| | | | | | 12592-13077 |
| HPJCL22 | 198 | 1146674 | AC022400 | 843 | 1-102 |
| | | | | | 373-826 |
| | | | | | 995-1315 |
| | | | | | 1450-1567 |
| | | | | | 2189-2515 |
| | | | | | 2599-2778 |
| | | | | | 3138-4132 |
| | | | | | 4537-4681 |
| | | | | | 4864-4998 |
| | | | | | 5144-5324 |
| | | | | | 5394-6211 |
| | | | | | 6816-6941 |
| | | | | | 7472-7647 |
| | | | | | 7791-8885 |
| | | | | | 9056-9368 |
| | | | | | 9506-9733 |
| | | | | | 9799-10100 |
| | | | | | 10277-10988 |
| | | | | | 11213-11751 |
| | | | | | 11783-11837 |
| | | | | | 11874-12473 |
| | | | | | 12591-13076 |
| HPJCL22 | 198 | 1146674 | AC037447 | 844 | 1-207 |
| HPJCL22 | 198 | 1146674 | AC037447 | 845 | 1-2124 |
| HPJCL22 | 198 | 1146674 | AC022400 | 846 | 1-207 |
| HPJCL22 | 198 | 1146674 | AC022400 | 847 | 1-2124 |
| | | | | | 2470-2567 |
| | | | | | 2865-2971 |
| HPRAL78 | 200 | 1352342 | AC007783 | 848 | 1-2334 |
| | | | | | 2508-3084 |
| | | | | | 3578-3890 |
| | | | | | 4198-4294 |
| | | | | | 4376-4623 |
| | | | | | 4712-5349 |
| | | | | | 5369-6088 |
| | | | | | 6527-7107 |
| | | | | | 7298-7392 |
| | | | | | 7730-7846 |
| | | | | | 9147-9476 |
| | | | | | 10487-10575 |
| | | | | | 10791-11298 |
| | | | | | 11485-11601 |
| | | | | | 11783-13009 |
| | | | | | 13207-13501 |
| | | | | | 13540-13772 |
| | | | | | 14439-14800 |
| | | | | | 14923-14983 |
| | | | | | 15133-15355 |
| | | | | | 15485-15653 |
| | | | | | 16750-16805 |
| | | | | | 16894-17078 |
| | | | | | 17162-17219 |
| | | | | | 18003-18089 |
| | | | | | 21085-21146 |
| | | | | | 21358-21501 |
| HPRAL78 | 200 | 1352342 | AC007783 | 849 | 1-308 |
| HPRAL78 | 200 | 1352342 | AC007783 | 850 | 1-1024 |
| HRGBL78 | 204 | 910133 | AL359541 | 851 | 1-254 |
| | | | | | 2777-3307 |
| | | | | | 3670-3823 |
| | | | | | 4113-4385 |
| | | | | | 4844-5381 |
| | | | | | 5995-7365 |
| HSAWD74 | 207 | 460527 | AC004951 | 852 | 1-1651 |
| | | | | | 1740-2593 |
| HSAWD74 | 207 | 460527 | AC004951 | 853 | 1-149 |
| HSAWD74 | 207 | 460527 | AC004951 | 854 | 1-5057 |
| | | | | | 5082-8353 |
| | | | | | 8404-8996 |
| HTPCS72 | 240 | 854941 | AL008639 | 855 | 1-106 |
| | | | | | 1457-1595 |
| | | | | | 1666-2484 |
| | | | | | 2910-3006 |
| | | | | | 3705-4147 |
| | | | | | 4768-5141 |
| | | | | | 5304-5536 |
| | | | | | 5746-5874 |
| | | | | | 7114-7241 |
| | | | | | 7468-7711 |
| | | | | | 7963-8746 |
| | | | | | 9438-12408 |
| | | | | | 12884-14976 |
| HTPCS72 | 240 | 854941 | AL008639 | 856 | 1-720 |
| HTPIH83 | 241 | 919916 | AL158821 | 857 | 1-1862 |
| | | | | | 1880-3126 |

[0105] Table 1D: The polynucleotides or polypeptides, or agonists or antagonists of the present invention can be used in assays to test for one or more biological activities. If these polynucleotides and polypeptides do exhibit activity in a particular assay, it is likely that these molecules may be involved in the diseases associated with the biological activity. Thus, the polynucleotides or polypeptides, or agonists or antagonists could be used to treat the associated disease.

[0106] The present invention encompasses methods of detecting, preventing, diagnosing, prognosticating, treating, and/or ameliorating a disease or disorder. In preferred embodiments, the present invention encompasses a method of treating diabetes mellitus comprising administering to a patient in which such detection, treatment, prevention, and/or amelioration is desired a protein, nucleic acid, or antibody of the invention (or fragment or variant thereof) in an amount effective to detect, prevent, diagnose, prognosticate, treat, and/or ameliorate diabetes mellitus.

[0107] In another embodiment, the present invention also encompasses methods of detecting, preventing, diagnosing, prognosticating, treating, and/or ameliorating diabetes mellitus; comprising administering to a patient combinations of the proteins, nucleic acids, or antibodies of the invention (or fragments or variants thereof), sharing similar indications as shown in the corresponding rows in Column 3 of Table 1D.

[0108] Table 1D provides information related to biological activities for polynucleotides and polypeptides of the invention (including antibodies, agonists, and/or antagonists thereof). Table 1D also provides information related to assays which may be used to test polynucleotides and polypeptides of the invention (including antibodies, agonists, and/or antagonists thereof) for the corresponding biological activities. The first column (“Gene No.”) provides the gene number in the application for each clone identifier. The second column (“cDNA Clone ID:”) provides the unique clone identifier for each clone as previously described and indicated in Table 1A through Table 1D. The third column (“AA SEQ ID NO:Y”) indicates the Sequence Listing SEQ ID Number for polypeptide sequences encoded by the corresponding cDNA clones (also as indicated in Tables 1A, Table 1B, and Table 2). The fourth column (“Biological Activity”) indicates a biological activity corresponding to the indicated polypeptides (or polynucleotides encoding said polypeptides). The fifth column (“Exemplary Activity Assay”) further describes the corresponding biological activity and also provides information pertaining to the various types of assays which may be performed to test, demonstrate, or quantify the corresponding biological activity.

[0109] Table 1D describes the use of, inter alia, FMAT technology for testing or demonstrating various biological activities. Fluorometric microvolume assay technology (FMAT) is a fluorescence-based system which provides a means to perform nonradioactive cell- and bead-based assays to detect activation of cell signal transduction pathways. This technology was designed specifically for ligand binding and immunological assays. Using this technology, fluorescent cells or beads at the bottom of the well are detected as localized areas of concentrated fluorescence using a data processing system. Unbound flurophore comprising the background signal is ignored, allowing for a wide variety of homogeneous assays. FMAT technology may be used for peptide ligand binding assays, immunofluorescence, apoptosis, cytotoxicity, and bead-based immunocapture assays. See, Miraglia S et. al., “Homogeneous cell and bead based assays for highthroughput screening using flourometric microvolume assay technology,” Journal of Biomolecular Screening; 4:193-204 (1999). In particular, FMAT technology may be used to test, confirm, and/or identify the ability of polypeptides (including polypeptide fragments and variants) to activate signal transduction pathways. For example, FMAT technology may be used to test, confirm, and/or identify the ability of polypeptides to upregulate production of immunomodulatory proteins (such as, for example, interleukins, GM-CSF, Rantes, and Tumor Necrosis factors, as well as other cellular regulators (e.g. insulin)).

[0110] Table 1D also describes the use of kinase assays for testing, demonstrating, or quantifying biological activity. In this regard, the phosphorylation and de-phosphorylation of specific amino acid residues (e.g. Tyrosine, Serine, Threonine) on cell-signal transduction proteins provides a fast, reversible means for activation and de-activation of cellular signal transduction pathways. Moreover, cell signal transduction via phosphorylation/de-phosphorylation is crucial to the regulation of a wide variety of cellular processes (e.g. proliferation, differentiation, migration, apoptosis, etc.). Accordingly, kinase assays provide a powerful tool useful for testing, confirming, and/or identifying polypeptides (including polypeptide fragments and variants) that mediate cell signal transduction events via protein phosphorylation. See e.g., Forrer, P., Tamaskovic R., and Jaussi, R. “Enzyme-Linked Immunosorbent Assay for Measurement of JNK, ERK, and p38 Kinase Activities” Biol. Chem. 379(8-9): 1101-1110 (1998).

LENGTHY TABLE REFERENCED HERE
US20070055056A1-20070308-T00002
Please refer to the end of the specification for access instructions.

[0111] Table 1E: Polynucleotides encoding polypeptides of the present invention can be used in assays to test for one or more biological activities. One such biological activity which may be tested includes the ability of polynucleotides and polypeptides of the invention to stimulate up-regulation or down-regulation of expression of particular genes and proteins. Hence, if polynucleotides and polypeptides of the present invention exhibit activity in altering particular gene and protein expression patterns, it is likely that these polynucleotides and polypeptides of the present invention may be involved in, or capable of effecting changes in, diseases associated with the altered gene and protein expression profiles. Hence, polynucleotides, polypeptides, or antibodies of the present invention could be used to treat said associated diseases.

[0112] TaqMan® assays may be performed to assess the ability of polynucleotides (and polypeptides they encode) to alter the expression pattern of particular “target” genes. TaqMan® reactions are performed to evaluate the ability of a test agent to induce or repress expression of specific genes in different cell types. TaqMan® gene expression quantification assays (“TaqMan® assays”) are well known to, and routinely performed by, those of ordinary skill in the art. TaqMan® assays are performed in a two step reverse transcription/polymerase chain reaction (RT-PCR). In the first (RT) step, cDNA is reverse transcribed from total RNA samples using random hexamer primers. In the second (PCR) step, PCR products are synthesized from the cDNA using gene specific primers.

[0113] To quantify gene expression the Taqman® PCR reaction exploits the 5′ nuclease activity of AmpliTaq Gold® DNA Polymerase to cleave a Taqman® probe (distinct from the primers) during PCR. The Taqman® probe contains a reporter dye at the 5′-end of the probe and a quencher dye at the 3′ end of the probe. When the probe is intact, the proximity of the reporter dye to the quencher dye results in suppression of the reporter fluorescence. During PCR, if the target of interest is present, the probe specifically anneals between the forward and reverse primer sites. AmpliTaq Fold DNA Polymerase then cleaves the probe between the reporter and quencher when the probe hybridizes to the target, resulting in increased fluorescence of the reporter (see FIG. 2). Accumulation of PCR products is detected directly by monitoring the increase in fluorescence of the reporter dye.

[0114] After the probe fragments are displaced from the target, polymerization of the strand continues. The 3′-end of the probe is blocked to prevent extension of the probe during PCR. This process occurs in every cycle and does not interfere with the exponential accumulation of product. The increase in fluorescence signal is detected only if the target sequence is complementary to the probe and is amplified during PCR. Because of these requirements, any nonspecific amplification is not detected.

[0115] For test sample preparation, vector controls or constructs containing the coding sequence for the gene of interest are transfected into cells, such as for example 293T cells, and supernatants collected after 48 hours. For cell treatment and RNA isolation, multiple primary human cells or human cell lines are used; such cells may include but are not limited to, Normal Human Dermal Fibroblasts, Aortic Smooth Muscle, Human Umbilical Vein Endothelial Cells, HepG2, Daudi, Jurkat, U937, Caco, and THP-1 cell lines. Cells are plated in growth media and growth is arrested by culturing without media change for 3 days, or by switching cells to low serum media and incubating overnight. Cells are treated for 1, 6, or 24 hours with either vector control supernatant or sample supernatant (or purified/partially purified protein preparations in buffer). Total RNA is isolated; for example, by using Trizol extraction or by using the Ambion RNAqueous™-4PCR RNA isolation system. Expression levels of multiple genes are analyzed using TAQMAN, and expression in the test sample is compared to control vector samples to identify genes induced or repressed. Each of the above described techniques are well known to, and routinely performed by, those of ordinary skill in the art.

[0116] Table 1E indicates particular disease classes and preferred indications for which polynucleotides, polypeptides, or antibodies of the present invention may be used in detecting, diagnosing, preventing, treating and/or ameliorating said diseases and disorders based on “target” gene expression patterns which may be up- or down-regulated by polynucleotides (and the encoded polypeptides) corresponding to each indicated cDNA Clone ID (shown in Table 1E, Column 2).

[0117] Thus, in preferred embodiments, the present invention encompasses a method of detecting, diagnosing, preventing, treating, and/or ameliorating a disease or disorder listed in the “Disease Class” and/or “Preferred Indication” columns of Table 1E; comprising administering to a patient in which such detection, diagnosis, prevention, or treatment is desired a protein, nucleic acid, or antibody of the invention (or fragment or variant thereof) in an amount effective to detect, diagnose, prevent, treat, or ameliorate the disease or disorder. The first and second columns of Table 1D show the “Gene No.” and “cDNA Clone ID No.”, respectively, indicating certain nucleic acids and proteins (or antibodies against the same) of the invention (including polynucleotide, polypeptide, and antibody fragments or variants thereof) that may be used in detecting, diagnosing, preventing, treating, or ameliorating the disease(s) or disorder(s) indicated in column 6 and as indicated in the corresponding row in the “Disease Class” or “Preferred Indication” Columns of Table 1E.

[0118] In another embodiment, the present invention also encompasses methods of detecting, diagnosing, preventing, treating, or ameliorating a disease or disorder listed in the “Disease Class” or “Preferred Indication” Columns of Table 1E; comprising administering to a patient combinations of the proteins, nucleic acids, or antibodies of the invention (or fragments or variants thereof), sharing similar indications as shown in the corresponding rows in the “Disease Class” or “Preferred Indication” Columns of Table 1E.

[0119] The “Disease Class” Column of Table 1E provides a categorized descriptive heading for diseases, disorders, and/or conditions (more fully described below) that may be detected, diagnosed, prevented, treated, or ameliorated by a protein, nucleic acid, or antibody of the invention (or fragment or variant thereof).

[0120] The “Preferred Indication” Column of Table 1E describes diseases, disorders, and/or conditions that may be detected, diagnosed, prevented, treated, or ameliorated by a protein, nucleic acid, or antibody of the invention (or fragment or variant thereof).

[0121] The “Cell Line” and “Exemplary Targets” Columns of Table 1E indicate particular cell lines and target genes, respectively, which may show altered gene expression patterns (i.e., up- or down-regulation of the indicated target gene) in Taqman assays, performed as described above, utilizing polynucleotides of the cDNA Clone ID shown in the corresponding row. Alteration of expression patterns of the indicated “Exemplary Target” genes is correlated with a particular “Disease Class” and/or “Preferred Indication” as shown in the corresponding row under the respective column headings.

[0122] The “Exemplary Accessions” Column indicates GenBank Accessions (available online through the National Center for Biotechnology Information (NCBI) at http://www.ncbi.nlm.nih.gov/) which correspond to the “Exemplary Targets” shown in the adjacent row.

[0123] The recitation of “Cancer” in the “Disease Class” Column indicates that the corresponding nucleic acid and protein, or antibody against the same, of the invention (or fragment or variant thereof) may be used for example, to detect, diagnose, prevent, treat, and/or ameliorate neoplastic diseases and/or disorders (e.g., leukemias, cancers, etc., as described below under “Hyperproliferative Disorders”).

[0124] The recitation of “Immune” in the “Disease Class” column indicates that the corresponding nucleic acid and protein, or antibody against the same, of the invention (or fragment or variant thereof), may be used for example, to detect, diagnose, prevent, treat, and/or ameliorate diseases and/or disorders relating to neoplastic diseases (e.g., as described below under “Hyperproliferative Disorders”), blood disorders (e.g., as described below under “Immune Activity” “Cardiovascular Disorders” and/or “Blood-Related Disorders”), and infections (e.g., as described below under “Infectious Disease”).

[0125] The recitation of “Angiogenesis” in the “Disease Class” column indicates that the corresponding nucleic acid and protein, or antibody against the same, of the invention (or fragment or variant thereof), may be used for example, to detect, diagnose, treat, prevent, and/or ameliorate diseases and/or disorders relating to neoplastic diseases (e.g., as described below under “Hyperproliferative Disorders”), diseases and/or disorders of the cardiovascular system (e.g., as described below under “Cardiovascular Disorders”), diseases and/or disorders involving cellular and genetic abnormalities (e.g., as described below under “Diseases at the Cellular Level”), diseases and/or disorders involving angiogenesis (e.g., as described below under “Anti-Angiogenesis Activity”), to promote or inhibit cell or tissue regeneration (e.g., as described below under “Regeneration”), or to promote wound healing (e.g., as described below under “Wound Healing and Epithelial Cell Proliferation”).

[0126] The recitation of “Diabetes” in the “Disease Class” column indicates that the corresponding nucleic acid and protein, or antibody against the same, of the invention (or fragment or variant thereof), may be used for example, to detect, diagnose, treat, prevent, and/or ameliorate diabetes (including diabetes mellitus types I and II), as well as diseases and/or disorders associated with, or consequential to, diabetes (e.g. as described below under “Endocrine Disorders,” “Renal Disorders,” and “Gastrointestinal Disorders”).

TABLE 1E

| | | Dis- | | | | |
|---|---|---|---|---|---|---|
| Gene | cDNA | ease | | | Exemplary | Exemplary |
| No. | Clone ID | Class | Preferred Indications | Cell Line | Targets | Accessions |
| 105 | HJACG02 | Dia- | A highly preferred indication is diabetes. Additional highly | Adi- | CAP | gb\|AF136380\|AF136380 |
| | | betes | preferred indications include complications associated with | pocytes | PEPCK1 | gb\|L05144\|HUMPHOCAR |
| | | | diabetes (e.g., diabetic retinopathy, diabetic nephropathy, kidney | (4D)- | | |
| | | | disease (e.g., renal failure, nephropathy and/or other diseases and | 09/01/01 | | |
| | | | disorders as described in the “Renal Disorders” section below), | | | |
| | | | diabetic neuropathy, nerve disease and nerve damage (e.g., due to | | | |
| | | | diabetic neuropathy), blood vessel blockage, heart disease, stroke, | | | |
| | | | impotence (e.g., due to diabetic neuropathy or blood vessel | | | |
| | | | blockage), seizures, mental confusion, drowsiness, nonketotic | | | |
| | | | hyperglycemic-hyperosmolar coma, cardiovascular disease (e.g., | | | |
| | | | heart disease, atherosclerosis, microvascular disease, hypertension, | | | |
| | | | stroke, and other diseases and disorders as described in the | | | |
| | | | “Cardiovascular Disorders” section below), dyslipidemia, endocrine | | | |
| | | | disorders (as described in the “Endocrine Disorders” section | | | |
| | | | below), neuropathy, vision impairment (e.g., diabetic retinopathy | | | |
| | | | and blindness), ulcers and impaired wound healing, and infection | | | |
| | | | (e.g., infectious diseases and disorders as described in the | | | |
| | | | “Infectious Diseases” section below, especially of the urinary tract | | | |
| | | | and skin). Highly preferred indications also include obesity, weight | | | |
| | | | gain, and weight loss, as well as complications associated with | | | |
| | | | obesity, weight gain, and weight loss. Preferred embodiments of | | | |
| | | | the invention include methods of preventing, detecting, diagnosing, | | | |
| | | | treating and/or ameliorating the above mentioned conditions, | | | |
| | | | disorders, and diseases. | | | |
| 105 | HJACG02 | Dia- | A highly preferred indication is diabetes. Additional highly | Adi- | CAP | gb\|AF136380\|AF136380 |
| | | betes | preferred indications include complications associated with | pocytes- | Hexo- | gb\|Z46354\|HSHKEX1 |
| | | | diabetes (e.g., diabetic retinopathy, diabetic nephropathy, kidney | 3/12/01 | kinase II | |
| | | | disease (e.g., renal failure, nephropathy and/or other diseases and | | | |
| | | | disorders as described in the “Renal Disorders” section below), | | | |
| | | | diabetic neuropathy, nerve disease and nerve damage (e.g., due to | | | |
| | | | diabetic neuropathy), blood vessel blockage, heart disease, stroke, | | | |
| | | | impotence (e.g., due to diabetic neuropathy or blood vessel | | | |
| | | | blockage), seizures, mental confusion, drowsiness, nonketotic | | | |
| | | | hyperglycemic-hyperosmolar coma, cardiovascular disease (e.g., | | | |
| | | | heart disease, atherosclerosis, microvascular disease, hypertension, | | | |
| | | | stroke, and other diseases and disorders as described in the | | | |
| | | | “Cardiovascular Disorders” section below), dyslipidemia, endocrine | | | |
| | | | disorders (as described in the “Endocrine Disorders” section | | | |
| | | | below), neuropathy, vision impairment (e.g., diabetic retinopathy | | | |
| | | | and blindness), ulcers and impaired wound healing, and infection | | | |
| | | | (e.g., infectious diseases and disorders as described in the | | | |
| | | | “Infectious Diseases” section below, especially of the urinary tract | | | |
| | | | and skin). Highly preferred indications also include obesity, weight | | | |
| | | | gain, and weight loss, as well as complications associated with | | | |
| | | | obesity, weight gain, and weight loss. Preferred embodiments of | | | |
| | | | the invention include methods of preventing, detecting, diagnosing, | | | |
| | | | treating and/or ameliorating the above mentioned conditions, | | | |
| | | | disorders, and diseases. | | | |
| 105 | HJACG02 | Dia- | A highly preferred indication is diabetes. Additional highly | AOSMC | IRS1 | gb\|X90563\|HSPPARGAM |
| | | betes | preferred indications include complications associated with | | PPARg | |
| | | | diabetes (e.g., diabetic retinopathy, diabetic nephropathy, kidney | | | |
| | | | disease (e.g., renal failure, nephropathy and/or other diseases and | | | |
| | | | disorders as described in the “Renal Disorders” section below), | | | |
| | | | diabetic neuropathy, nerve disease and nerve damage (e.g., due to | | | |
| | | | diabetic neuropathy), blood vessel blockage, heart disease, stroke, | | | |
| | | | impotence (e.g., due to diabetic neuropathy or blood vessel | | | |
| | | | blockage), seizures, mental confusion, drowsiness, nonketotic | | | |
| | | | hyperglycemic-hyperosmolar coma, cardiovascular disease (e.g., | | | |
| | | | heart disease, atherosclerosis, microvascular disease, hypertension, | | | |
| | | | stroke, and other diseases and disorders as described in the | | | |
| | | | “Cardiovascular Disorders” section below), dyslipidemia, endocrine | | | |
| | | | disorders (as described in the “Endocrine Disorders” section | | | |
| | | | below), neuropathy, vision impairment (e.g., diabetic retinopathy | | | |
| | | | and blindness), ulcers and impaired wound healing, and infection | | | |
| | | | (e.g., infectious diseases and disorders as described in the | | | |
| | | | “Infectious Diseases” section below, especially of the urinary tract | | | |
| | | | and skin). Highly preferred indications also include obesity, weight | | | |
| | | | gain, and weight loss, as well as complications associated with | | | |
| | | | obesity, weight gain, and weight loss. Preferred embodiments of | | | |
| | | | the invention include methods of preventing, detecting, diagnosing, | | | |
| | | | treating and/or ameliorating the above mentioned conditions, | | | |
| | | | disorders, and diseases. (AOSMC cells are human aortic smooth | | | |
| | | | muscle cells). | | | |
| 105 | HJACG02 | Dia- | A highly preferred indication is diabetes. Additional highly | Liver | Glucose6 | gb\|U91844\|CFU91844 |
| | | betes | preferred indications include complications associated with | | phos- | |
| | | | diabetes (e.g., diabetic retinopathy, diabetic nephropathy, kidney | | phatase | |
| | | | disease (e.g., renal failure, nephropathy and/or other diseases and | | | |
| | | | disorders as described in the “Renal Disorders” section below), | | | |
| | | | diabetic neuropathy, nerve disease and nerve damage (e.g., due to | | | |
| | | | diabetic neuropathy), blood vessel blockage, heart disease, stroke, | | | |
| | | | impotence (e.g., due to diabetic neuropathy or blood vessel | | | |
| | | | blockage), seizures, mental confusion, drowsiness, nonketotic | | | |
| | | | hyperglycemic-hyperosmolar coma, cardiovascular disease (e.g., | | | |
| | | | heart disease, atherosclerosis, microvascular disease, hypertension, | | | |
| | | | stroke, and other diseases and disorders as described in the | | | |
| | | | “Cardiovascular Disorders” section below), dyslipidemia, endocrine | | | |
| | | | disorders (as described in the “Endocrine Disorders” section | | | |
| | | | below), neuropathy, vision impairment (e.g., diabetic retinopathy | | | |
| | | | and blindness), ulcers and impaired wound healing, and infection | | | |
| | | | (e.g., infectious diseases and disorders as described in the | | | |
| | | | “Infectious Diseases” section below, especially of the urinary tract | | | |
| | | | and skin). Highly preferred indications also include obesity, weight | | | |
| | | | gain, and weight loss, as well as complications associated with | | | |
| | | | obesity, weight gain, and weight loss. Preferred embodiments of | | | |
| | | | the invention include methods of preventing, detecting, diagnosing, | | | |
| | | | treating and/or ameliorating the above mentioned conditions, | | | |
| | | | disorders, and diseases. | | | |
| 105 | HJACG02 | Im- | Highly preferred indications include immunological disorders such | Adi- | ICAM | gb\|X06990\|HSICAM1 |
| | | mune | as described herein under the heading “Immune Activity” and/or | pocytes- | Il6 | gb\|X04403\|HS26KDAR |
| | | | “Blood-Related Disorders” (particularly including, but not limited | 3/12/01 | Rag1 | gb\|M29474\|HUMRAG1 |
| | | | to, immune disorders involving adipocytes). Highly preferred | | | |
| | | | embodiments of the invention include methods of preventing, | | | |
| | | | detecting, diagnosing, treating and/or ameliorating disorders of the | | | |
| | | | immune system (particularly including, but not limited to, immune | | | |
| | | | disorders involving adipocytes). | | | |
| 105 | HJACG02 | Im- | Highly preferred indications include immunological disorders such | AOSMC | CD30 | gb\|AJ300189\|HSA30018 |
| | | mune | as described herein under the heading “Immune Activity” and/or | | CD40 | gb\|X02532\|HSIL1BR |
| | | | “Blood-Related Disorders” (particularly including, but not limited | | IL1B | gb\|X12705\|HSBCDFIA |
| | | | to, immune disorders involving muscle tissues and the | | IL5 | gb\|AJ270944\|HSA27094 |
| | | | cardiovascular system (e.g. heart, lungs, circulatory system)). | | TNF | gb\|A30922\|A30922 |
| | | | Highly preferred embodiments of the invention include methods of | | VCAM | |
| | | | preventing, detecting, diagnosing, treating and/or ameliorating | | | |
| | | | disorders of the immune system (particularly including, but not | | | |
| | | | limited to, immune disorders involving muscle tissue or the | | | |
| | | | cardiovascular system). (AOSMC cells are human aortic smooth | | | |
| | | | muscle cells). | | | |
| 105 | HJACG02 | Im- | Highly preferred indications include immunological disorders such | Caco-2 | Rag1 | gb\|M29474\|HUMRAG1 |
| | | mune | as described herein under the heading “Immune Activity” and/or | | | |
| | | | “Blood-Related Disorders” (particularly including, but not limited | | | |
| | | | to, immune disorders involving the cells of the gastrointestinal | | | |
| | | | tract). Highly preferred embodiments of the invention include | | | |
| | | | methods of preventing, detecting, diagnosing, treating and/or | | | |
| | | | ameliorating disorders of the immune system (particularly | | | |
| | | | including, but not limited to, immune disorders involving cells of | | | |
| | | | the gastrointestinal tract). (The Caco-2 cell line is a human | | | |
| | | | colorectal adenocarcinoma cell line available through the ATCC as | | | |
| | | | cell line number HTB-37). | | | |
| 105 | HJACG02 | Im- | Highly preferred indications include immunological disorders such | Daudi | ICAM | gb\|X06990\|HSICAM1 |
| | | mune | as described herein under the heading “Immune Activity” and/or | | Rag1 | gb\|M29474\|HUMRAG1 |
| | | | “Blood-Related Disorders” (particularly including, but not limited | | VCAM | gb\|A30922\|A30922 |
| | | | to, immune disorders involving the B-cells). Highly preferred | | | |
| | | | embodiments of the invention include methods of preventing, | | | |
| | | | detecting, diagnosing, treating and/or ameliorating disorders of the | | | |
| | | | immune system (particularly including, but not limited to, immune | | | |
| | | | disorders involving B-cells). (The Daudi cell line is a human B | | | |
| | | | lymphoblast cell line available through the ATCC as cell line | | | |
| | | | number CCL-213). | | | |
| 105 | HJACG02 | Im- | Highly preferred indications include immunological disorders such | HEK293 | c-maf | gb\|AF055377\|AF055377 |
| | | mune | as described herein under the heading “Immune Activity” and/or | | | |
| | | | “Blood-Related Disorders” (particularly including, but not limited | | | |
| | | | to, immune disorders involving epithelial cells or the renal system). | | | |
| | | | Highly preferred embodiments of the invention include methods of | | | |
| | | | preventing, detecting, diagnosing, treating and/or ameliorating | | | |
| | | | disorders of the immune system (particularly including, but not | | | |
| | | | limited to, immune disorders involving epithelial cells or the renal | | | |
| | | | system). (The 293 cell line is a human embryonal kidney epithelial | | | |
| | | | cell line available through the ATCC as cell line number CRL- | | | |
| | | | 1573). | | | |
| 105 | HJACG02 | Im- | Highly preferred indications include immunological disorders such | HUVEC | ICAM | gb\|X06990\|HSICAM1 |
| | | mune | as described herein under the heading “Immune Activity” and/or | | | |
| | | | “Blood-Related Disorders” (particularly including, but not limited | | | |
| | | | to, immune disorders involving endothelial cells). Highly preferred | | | |
| | | | embodiments of the invention include methods of preventing, | | | |
| | | | detecting, diagnosing, treating and/or ameliorating disorders of the | | | |
| | | | immune system (particularly including, but not limited to, immune | | | |
| | | | disorders involving endothelial cells). (HUVEC cells are human | | | |
| | | | umbilical vein endothelial cells). | | | |
| 105 | HJACG02 | Im- | Highly preferred indications include immunological disorders such | Jurkat | Rag2 | gb\|AY011962\|AY011962 |
| | | mune | as described herein under the heading “Immune Activity” and/or | | TNF | gb\|AJ270944\|HSA27094 |
| | | | “Blood-Related Disorders” (particularly including, but not limited | | | |
| | | | to, immune disorders involving T-cells). Highly preferred | | | |
| | | | embodiments of the invention include methods of preventing, | | | |
| | | | detecting, diagnosing, treating and/or ameliorating disorders of the | | | |
| | | | immune system (particularly including, but not limited to, immune | | | |
| | | | disorders involving T-cells). (The Jurkat cell line is a human T | | | |
| | | | lymphocyte cell line available through the ATCC as cell line | | | |
| | | | number TIB-152). | | | |
| 105 | HJACG02 | Im- | Highly preferred indications include immunological disorders such | NHDF | Rag1 | gb\|M29474\|HUMRAG1 |
| | | mune | as described herein under the heading “Immune Activity” and/or | | | |
| | | | “Blood-Related Disorders” (particularly including, but not limited | | | |
| | | | to, immune disorders involving the skin). Highly preferred | | | |
| | | | embodiments of the invention include methods of preventing, | | | |
| | | | detecting, diagnosing, treating and/or ameliorating disorders of the | | | |
| | | | immune system (particularly including, but not limited to, immune | | | |
| | | | disorders involving the skin). (NHDF cells are normal human | | | |
| | | | dermal fibroblasts). | | | |
| 105 | HJACG02 | Im- | Highly preferred indications include immunological disorders such | U937 | GATA1 | gb\|X17254\|HSERYF1 |
| | | mune | as described herein under the heading “Immune Activity” and/or | | IL5 | gb\|X12705\|HSBCDFIA |
| | | | “Blood-Related Disorders” (particularly including, but not limited | | TNF | gb\|AJ270944\|HSA27094 |
| | | | to, immune disorders involving monocytes). Highly preferred | | | |
| | | | embodiments of the invention include methods of preventing, | | | |
| | | | detecting, diagnosing, treating and/or ameliorating disorders of the | | | |
| | | | immune system (particularly including, but not limited to, immune | | | |
| | | | disorders involving monocytes). (The U937 cell line is a human | | | |
| | | | monocyte cell line available through the ATCC as cell line number | | | |
| | | | CRL-1593.2). | | | |
| 110 | HKACD58 | Im- | Highly preferred indications include immunological disorders such | AOSMC | VCAM | gb\|A30922\|A30922 |
| | | mune | as described herein under the heading “Immune Activity” and/or | | | |
| | | | “Blood-Related Disorders” (particularly including, but not limited | | | |
| | | | to, immune disorders involving muscle tissues and the | | | |
| | | | cardiovascular system (e.g. heart, lungs, circulatory system)). | | | |
| | | | Highly preferred embodiments of the invention include methods of | | | |
| | | | preventing, detecting, diagnosing, treating and/or ameliorating | | | |
| | | | disorders of the immune system (particularly including, but not | | | |
| | | | limited to, immune disorders involving muscle tissue or the | | | |
| | | | cardiovascular system). (AOSMC cells are human aortic smooth | | | |
| | | | muscle cells). | | | |
| 110 | HKACD58 | Im- | Highly preferred indications include immunological disorders such | Daudi | CD40 | gb\|AJ300189\|HSA30018 |
| | | mune | as described herein under the heading “Immune Activity” and/or | | | |
| | | | “Blood-Related Disorders” (particularly including, but not limited | | | |
| | | | to, immune disorders involving the B-cells). Highly preferred | | | |
| | | | embodiments of the invention include methods of preventing, | | | |
| | | | detecting, diagnosing, treating and/or ameliorating disorders of the | | | |
| | | | immune system (particularly including, but not limited to, immune | | | |
| | | | disorders involving B-cells). (The Daudi cell line is a human B | | | |
| | | | lymphoblast cell line available through the ATCC as cell line | | | |
| | | | number CCL-213). | | | |
| 110 | HKACD58 | Im- | Highly preferred indications include immunological disorders such | HUVEC | ICAM | gb\|X06990\|HSICAM1 |
| | | mune | as described herein under the heading “Immune Activity” and/or | | Rag1 | gb\|M29474\|HUMRAG1 |
| | | | “Blood-Related Disorders” (particularly including, but not limited | | | |
| | | | to, immune disorders involving endothelial cells). Highly preferred | | | |
| | | | embodiments of the invention include methods of preventing, | | | |
| | | | detecting, diagnosing, treating and/or ameliorating disorders of the | | | |
| | | | immune system (particularly including, but not limited to, immune | | | |
| | | | disorders involving endothelial cells). (HUVEC cells are human | | | |
| | | | umbilical vein endothelial cells). | | | |
| 110 | HKACD58 | Im- | Highly preferred indications include immunological disorders such | Liver | CD28 | gb\|AF222342\|AF222342 |
| | | mune | as described herein under the heading “Immune Activity” and/or | | | |
| | | | “Blood-Related Disorders” (particularly including, but not limited | | | |
| | | | to, immune disorders involving cells of the hepatic system). Highly | | | |
| | | | preferred embodiments of the invention include methods of | | | |
| | | | preventing, detecting, diagnosing, treating and/or ameliorating | | | |
| | | | disorders of the immune system (particularly including, but not | | | |
| | | | limited to, immune disorders involving cells of the hepatic system). | | | |
| 110 | HKACD58 | Im- | Highly preferred indications include immunological disorders such | NHDF | CXCR3 | gb\|Z79783\|HSCKRL2 |
| | | mune | as described herein under the heading “Immune Activity” and/or | | GATA1 | gb\|X17254\|HSERYF1 |
| | | | “Blood-Related Disorders” (particularly including, but not limited | | Il6 | gb\|X04403\|HS26KDAR |
| | | | to, immune disorders involving the skin). Highly preferred | | VCAM | gb\|A30922\|A30922 |
| | | | embodiments of the invention include methods of preventing, | | | |
| | | | detecting, diagnosing, treating and/or ameliorating disorders of the | | | |
| | | | immune system (particularly including, but not limited to, immune | | | |
| | | | disorders involving the skin). (NHDF cells are normal human | | | |
| | | | dermal fibroblasts). | | | |
| 110 | HKACD58 | Im- | Highly preferred indications include immunological disorders such | THP1 | CIS3 | gb\|AB006967\|AB006967 |
| | | mune | as described herein under the heading “Immune Activity” and/or | | | |
| | | | “Blood-Related Disorders” (particularly including, but not limited | | | |
| | | | to, immune disorders involving monocytes). Highly preferred | | | |
| | | | embodiments of the invention include methods of preventing, | | | |
| | | | detecting, diagnosing, treating and/or ameliorating disorders of the | | | |
| | | | immune system (particularly including, but not limited to, immune | | | |
| | | | disorders involving monocytes). (The THP1 cell line is a human | | | |
| | | | monocyte cell line available through the ATCC as cell line number | | | |
| | | | TIB-202). | | | |
| 110 | HKACD58 | Im- | Highly preferred indications include immunological disorders such | U937 | CD69 | gb\|Z22576\|HSCD69GNA |
| | | mune | as described herein under the heading “Immune Activity” and/or | | TNF | gb\|AJ270944\|HSA27094 |
| | | | “Blood-Related Disorders” (particularly including, but not limited | | | |
| | | | to, immune disorders involving monocytes). Highly preferred | | | |
| | | | embodiments of the invention include methods of preventing, | | | |
| | | | detecting, diagnosing, treating and/or ameliorating disorders of the | | | |
| | | | immune system (particularly including, but not limited to, immune | | | |
| | | | disorders involving monocytes). (The U937 cell line is a human | | | |
| | | | monocyte cell line available through the ATCC as cell line number | | | |
| | | | CRL-1593.2). | | | |
| 202 | HSDSB09 | Dia- | A highly preferred indication is diabetes. Additional highly | AOSMC | GAPDH | |
| | | betes | preferred indications include complications associated with | | | |
| | | | diabetes (e.g., diabetic retinopathy, diabetic nephropathy, kidney | | | |
| | | | disease (e.g., renal failure, nephropathy and/or other diseases and | | | |
| | | | disorders as described in the “Renal Disorders” section below), | | | |
| | | | diabetic neuropathy, nerve disease and nerve damage (e.g., due to | | | |
| | | | diabetic neuropathy), blood vessel blockage, heart disease, stroke, | | | |
| | | | impotence (e.g., due to diabetic neuropathy or blood vessel | | | |
| | | | blockage), seizures, mental confusion, drowsiness, nonketotic | | | |
| | | | hyperglycemic-hyperosmolar coma, cardiovascular disease (e.g., | | | |
| | | | heart disease, atherosclerosis, microvascular disease, hypertension, | | | |
| | | | stroke, and other diseases and disorders as described in the | | | |
| | | | “Cardiovascular Disorders” section below), dyslipidemia, endocrine | | | |
| | | | disorders (as described in the “Endocrine Disorders” section | | | |
| | | | below), neuropathy, vision impairment (e.g., diabetic retinopathy | | | |
| | | | and blindness), ulcers and impaired wound healing, and infection | | | |
| | | | (e.g., infectious diseases and disorders as described in the | | | |
| | | | “Infectious Diseases” section below, especially of the urinary tract | | | |
| | | | and skin). Highly preferred indications also include obesity, weight | | | |
| | | | gain, and weight loss, as well as complications associated with | | | |
| | | | obesity, weight gain, and weight loss. Preferred embodiments of | | | |
| | | | the invention include methods of preventing, detecting, diagnosing, | | | |
| | | | treating and/or ameliorating the above mentioned conditions, | | | |
| | | | disorders, and diseases.(AOSMC cells are human aortic smooth | | | |
| | | | muscle cells). | | | |
| 202 | HSDSB09 | Im- | Highly preferred indications include immunological disorders such | AOSMC | CCR3 | gb\|AB023887\|AB023887 |
| | | mune | as described herein under the heading “Immune Activity” and/or | | CCR4 | gb\|AB023888\|AB023888 |
| | | | “Blood-Related Disorders” (particularly including, but not limited | | CD25 | gb\|X03137\|HSIL2RG7 |
| | | | to, immune disorders involving muscle tissues and the | | CD30 | gb\|AJ300189\|HSA30018 |
| | | | cardiovascular system (e.g. heart, lungs, circulatory system)). | | CD40 | gb\|AF316875\|AF316875 |
| | | | Highly preferred embodiments of the invention include methods of | | CTLA4 | gb\|X12705\|HSBCDFIA |
| | | | preventing, detecting, diagnosing, treating and/or ameliorating | | IL5 | gb\|M29474\|HUMRAG1 |
| | | | disorders of the immune system (particularly including, but not | | Rag1 | gb\|A30922\|A30922 |
| | | | limited to, immune disorders involving muscle tissue or the | | VCAM | |
| | | | cardiovascular system). (AOSMC cells are human aortic smooth | | | |
| | | | muscle cells). | | | |
| 202 | HSDSB09 | Im- | Highly preferred indications include immunological disorders such | Caco-2 | c-maf | gb\|AF055377\|AF055377 |
| | | mune | as described herein under the heading “Immune Activity” and/or | | GATA3 | gb\|X55037\|HSGATA3 |
| | | | “Blood-Related Disorders” (particularly including, but not limited | | ICAM | gb\|X06990\|HSICAM1 |
| | | | to, immune disorders involving the cells of the gastrointestinal | | Rag1 | gb\|M29474\|HUMRAG1 |
| | | | tract). Highly preferred embodiments of the invention include | | | |
| | | | methods of preventing, detecting, diagnosing, treating and/or | | | |
| | | | ameliorating disorders of the immune system (particularly | | | |
| | | | including, but not limited to, immune disorders involving cells of | | | |
| | | | the gastrointestinal tract). (The Caco-2 cell line is a human | | | |
| | | | colorectal adenocarcinoma cell line available through the ATCC as | | | |
| | | | cell line number HTB-37). | | | |
| 202 | HSDSB09 | Im- | Highly preferred indications include immunological disorders such | Daudi | TNF | gb\|AJ270944\|HSA27094 |
| | | mune | as described herein under the heading “Immune Activity” and/or | | | |
| | | | “Blood-Related Disorders” (particularly including, but not limited | | | |
| | | | to, immune disorders involving the B-cells). Highly preferred | | | |
| | | | embodiments of the invention include methods of preventing, | | | |
| | | | detecting, diagnosing, treating and/or ameliorating disorders of the | | | |
| | | | immune system (particularly including, but not limited to, immune | | | |
| | | | disorders involving B-cells). (The Daudi cell line is a human B | | | |
| | | | lymphoblast cell line available through the ATCC as cell line | | | |
| | | | number CCL-213). | | | |
| 202 | HSDSB09 | Im- | Highly preferred indications include immunological disorders such | H9 | CIS3 | gb\|AB006967\|AB006967 |
| | | mune | as described herein under the heading “Immune Activity” and/or | | Rag1 | gb\|M29474\|HUMRAG1 |
| | | | “Blood-Related Disorders” (particularly including, but not limited | | | |
| | | | to, immune disorders involving the T-cells). Highly preferred | | | |
| | | | embodiments of the invention include methods of preventing, | | | |
| | | | detecting, diagnosing, treating and/or ameliorating disorders of the | | | |
| | | | immune system (particularly including, but not limited to, immune | | | |
| | | | disorders involving T-cells). (The H9 cell line is a human T | | | |
| | | | lymphocyte cell line available through the ATCC as cell line | | | |
| | | | number HTB-176). | | | |
| 202 | HSDSB09 | Im- | Highly preferred indications include immunological disorders such | HEK293 | CCR3 | gb\|AB023887\|AB023887 |
| | | mune | as described herein under the heading “Immune Activity” and/or | | CCR4 | gb\|AB023888\|AB023888 |
| | | | “Blood-Related Disorders” (particularly including, but not limited | | CD25 | gb\|X03137\|HSIL2RG7 |
| | | | to, immune disorders involving epithelial cells or the renal system). | | CD30 | gb\|AJ300189\|HSA30018 |
| | | | Highly preferred embodiments of the invention include methods of | | CD40 | gb\|AF316875\|AF316875 |
| | | | preventing, detecting, diagnosing, treating and/or ameliorating | | CTLA4 | gb\|X55037\|HSGATA3 |
| | | | disorders of the immune system (particularly including, but not | | GATA3 | gb\|M29474\|HUMRAG1 |
| | | | limited to, immune disorders involving epithelial cells or the renal | | Rag1 | gb\|AJ270944\|HSA27094 |
| | | | system). (The 293 cell line is a human embryonal kidney epithelial | | TNF | gb\|A30922\|A30922 |
| | | | cell line available through the ATCC as cell line number CRL- | | VCAM | |
| | | | 1573). | | | |
| 202 | HSDSB09 | Im- | Highly preferred indications include immunological disorders such | HUVEC | CD40 | gb\|AJ300189\|HSA30018 |
| | | mune | as described herein under the heading “Immune Activity” and/or | | ICAM | gb\|X06990\|HSICAM1 |
| | | | “Blood-Related Disorders” (particularly including, but not limited | | IL10 | gb\|AF055467\|AF055467 |
| | | | to, immune disorders involving endothelial cells). Highly preferred | | Rag1 | gb\|M29474\|HUMRAG1 |
| | | | embodiments of the invention include methods of preventing, | | Rag2 | gb\|AY011962\|AY011962 |
| | | | detecting, diagnosing, treating and/or ameliorating disorders of the | | TNF | gb\|AJ270944\|HSA27094 |
| | | | immune system (particularly including, but not limited to, immune | | | |
| | | | disorders involving endothelial cells). (HUVEC cells are human | | | |
| | | | umbilical vein endothelial cells). | | | |
| 202 | HSDSB09 | Im- | Highly preferred indications include immunological disorders such | Jurkat | CD69 | gb\|Z22576\|HSCD69GNA |
| | | mune | as described herein under the heading “Immune Activity” and/or | | IL5 | gb\|X12705\|HSBCDFIA |
| | | | “Blood-Related Disorders” (particularly including, but not limited | | Rantes | gb\|AF043341\|AF043341 |
| | | | to, immune disorders involving T-cells). Highly preferred | | TNF | gb\|AJ270944\|HSA27094 |
| | | | embodiments of the invention include methods of preventing, | | | |
| | | | detecting, diagnosing, treating and/or ameliorating disorders of the | | | |
| | | | immune system (particularly including, but not limited to, immune | | | |
| | | | disorders involving T-cells). (The Jurkat cell line is a human T | | | |
| | | | lymphocyte cell line available through the ATCC as cell line | | | |
| | | | number TIB-152). | | | |
| 202 | HSDSB09 | Im- | Highly preferred indications include immunological disorders such | Liver | CD25 | gb\|X03137\|HSIL2RG7 |
| | | mune | as described herein under the heading “Immune Activity” and/or | | | |
| | | | “Blood-Related Disorders” (particularly including, but not limited | | | |
| | | | to, immune disorders involving cells of the hepatic system). Highly | | | |
| | | | preferred embodiments of the invention include methods of | | | |
| | | | preventing, detecting, diagnosing, treating and/or ameliorating | | | |
| | | | disorders of the immune system (particularly including, but not | | | |
| | | | limited to, immune disorders involving cells of the hepatic system). | | | |
| 202 | HSDSB09 | Im- | Highly preferred indications include immunological disorders such | Molt4 | CD28 | gb\|AF222342\|AF222342 |
| | | mune | as described herein under the heading “Immune Activity” and/or | | | |
| | | | “Blood-Related Disorders” (particularly including, but not limited | | | |
| | | | to, immune disorders involving T-cells). Highly preferred | | | |
| | | | embodiments of the invention include methods of preventing, | | | |
| | | | detecting, diagnosing, treating and/or ameliorating disorders of the | | | |
| | | | immune system (particularly including, but not limited to, immune | | | |
| | | | disorders involving T-cells). (The Molt-4 cell line is a human T-cell | | | |
| | | | line available through the ATCC as cell line number CRL-1582). | | | |
| 202 | HSDSB09 | Im- | Highly preferred indications include immunological disorders such | NHDF | CD28 | gb\|AF222342\|AF222342 |
| | | mune | as described herein under the heading “Immune Activity” and/or | | CD40 | gb\|AJ300189\|HSA30018 |
| | | | “Blood-Related Disorders” (particularly including, but not limited | | Il6 | gb\|X04403\|HS26KDAR |
| | | | to, immune disorders involving the skin). Highly preferred | | | |
| | | | embodiments of the invention include methods of preventing, | | | |
| | | | detecting, diagnosing, treating and/or ameliorating disorders of the | | | |
| | | | immune system (particularly including, but not limited to, immune | | | |
| | | | disorders involving the skin). (NHDF cells are normal human | | | |
| | | | dermal fibroblasts). | | | |
| 202 | HSDSB09 | Im- | Highly preferred indications include immunological disorders such | SK-N-MC | c-maf | gb\|AF055377\|AF055377 |
| | | mune | as described herein under the heading “Immune Activity” and/or | neuro- | CIS3 | gb\|AB006967\|AB006967 |
| | | | “Blood-Related Disorders” (particularly including, but not limited | blastoma | TNF | gb\|AJ270944\|HSA27094 |
| | | | to, immune disorders involving the central nervous system). | | | |
| | | | Highly preferred embodiments of the invention include methods of | | | |
| | | | preventing, detecting, diagnosing, treating and/or ameliorating | | | |
| | | | disorders of the immune system (particularly including, but not | | | |
| | | | limited to, immune disorders involving the central nervous sytem). | | | |
| | | | (The SK-N-MC neuroblastoma cell line is a cell line derived from | | | |
| | | | human brain tissue and is available through the ATCC as cell line | | | |
| | | | number HTB-10). | | | |
| 202 | HSDSB09 | Im- | Highly preferred indications include immunological disorders such | SUPT | TNF | gb\|AJ270944\|HSA27094 |
| | | mune | as described herein under the heading “Immune Activity” and/or | | VCAM | gb\|A30922\|A30922 |
| | | | “Blood-Related Disorders” (particularly including, but not limited | | | |
| | | | to, immune disorders involving T-cells). Highly preferred | | | |
| | | | embodiments of the invention include methods of preventing, | | | |
| | | | detecting, diagnosing, treating and/or ameliorating disorders of the | | | |
| | | | immune system (particularly including, but not limited to, immune | | | |
| | | | disorders involving T-cells). (The SUPT cell line is a human T-cell | | | |
| | | | line). | | | |
| 202 | HSDSB09 | Im- | Highly preferred indications include immunological disorders such | THP1 | CCR3 | gb\|AB023887\|AB023887 |
| | | mune | as described herein under the heading “Immune Activity” and/or | | CD40 | gb\|AJ300189\|HSA300018 |
| | | | “Blood-Related Disorders” (particularly including, but not limited | | GATA3 | gb\|X55037\|HSGATA3 |
| | | | to, immune disorders involving monocytes). Highly preferred | | ICAM | gb\|X06990\|HSICAM1 |
| | | | embodiments of the invention include methods of preventing, | | IL5 | gb\|X12705\|HSBCDFIA |
| | | | detecting, diagnosing, treating and/or ameliorating disorders of the | | Rag2 | gb\|AY011962\|AY011962 |
| | | | immune system (particularly including, but not limited to, immune | | VCAM | gb\|A30922\|A30922 |
| | | | disorders involving monocytes). (The THP1 cell line is a human | | | |
| | | | monocyte cell line available through the ATCC as cell line number | | | |
| | | | TIB-202). | | | |
| 202 | HSDSB09 | Im- | Highly preferred indications include immunological disorders such | U937 | IL1B | gb\|X02532\|HSIL1BR |
| | | mune | as described herein under the heading “Immune Activity” and/or | | | |
| | | | “Blood-Related Disorders” (particularly including, but not limited | | | |
| | | | to, immune disorders involving monocytes). Highly preferred | | | |
| | | | embodiments of the invention include methods of preventing, | | | |
| | | | detecting, diagnosing, treating and/or ameliorating disorders of the | | | |
| | | | immune system (particularly including, but not limited to, immune | | | |
| | | | disorders involving monocytes). (The U937 cell line is a human | | | |
| | | | monocyte cell line available through the ATCC as cell line number | | | |
| | | | CRL-1593.2). | | | |
| 247 | HWHGZ51 | Dia- | A highly preferred indication is diabetes. Additional highly | Liver | GAPDH | |
| | | betes | preferred indications include complications associated with | | | |
| | | | diabetes (e.g., diabetic retinopathy, diabetic nephropathy, kidney | | | |
| | | | disease (e.g., renal failure, nephropathy and/or other diseases and | | | |
| | | | disorders as described in the “Renal Disorders” section below), | | | |
| | | | diabetic neuropathy, nerve disease and nerve damage (e.g., due to | | | |
| | | | diabetic neuropathy), blood vessel blockage, heart disease, stroke, | | | |
| | | | impotence (e.g., due to diabetic neuropathy or blood vessel | | | |
| | | | blockage), seizures, mental confusion, drowsiness, nonketotic | | | |
| | | | hyperglycemic-hyperosmolar coma, cardiovascular disease (e.g., | | | |
| | | | heart disease, atherosclerosis, microvascular disease, hypertension, | | | |
| | | | stroke, and other diseases and disorders as described in the | | | |
| | | | “Cardiovascular Disorders” section below), dyslipidemia, endocrine | | | |
| | | | disorders (as described in the “Endocrine Disorders” section | | | |
| | | | below), neuropathy, vision impairment (e.g., diabetic retinopathy | | | |
| | | | and blindness), ulcers and impaired wound healing, and infection | | | |
| | | | (e.g., infectious diseases and disorders as described in the | | | |
| | | | “Infectious Diseases” section below, especially of the urinary tract | | | |
| | | | and skin). Highly preferred indications also include obesity, weight | | | |
| | | | gain, and weight loss, as well as complications associated with | | | |
| | | | obesity, weight gain, and weight loss. Preferred embodiments of | | | |
| | | | the invention include methods of preventing, detecting, diagnosing, | | | |
| | | | treating and/or ameliorating the above mentioned conditions, | | | |
| | | | disorders, and diseases. | | | |
| 247 | HWHGZ51 | Im- | Highly preferred indications include immunological disorders such | AOSMC | CD30 | gb\|X04403\|HS26KDAR |
| | | mune | as described herein under the heading “Immune Activity” and/or | | Il6 | |
| | | | “Blood-Related Disorders” (particularly including, but not limited | | | |
| | | | to, immune disorders involving muscle tissues and the | | | |
| | | | cardiovascular system (e.g. heart, lungs, circulatory system)). | | | |
| | | | Highly preferred embodiments of the invention include methods of | | | |
| | | | preventing, detecting, diagnosing, treating and/or ameliorating | | | |
| | | | disorders of the immune system (particularly including, but not | | | |
| | | | limited to, immune disorders involving muscle tissue or the | | | |
| | | | cardiovascular system). (AOSMC cells are human aortic smooth | | | |
| | | | muscle cells). | | | |
| 247 | HWHGZ51 | Im- | Highly preferred indications include immunological disorders such | Caco-2 | Rag1 | gb\|M29474\|HUMRAG1 |
| | | mune | as described herein under the heading “Immune Activity” and/or | | | |
| | | | “Blood-Related Disorders” (particularly including, but not limited | | | |
| | | | to, immune disorders involving the cells of the gastrointestinal | | | |
| | | | tract). Highly preferred embodiments of the invention include | | | |
| | | | methods of preventing, detecting, diagnosing, treating and/or | | | |
| | | | ameliorating disorders of the immune system (particularly | | | |
| | | | including, but not limited to, immune disorders involving cells of | | | |
| | | | the gastrointestinal tract). (The Caco-2 cell line is a human | | | |
| | | | colorectal adenocarcinoma cell line available through the ATCC as | | | |
| | | | cell line number HTB-37). | | | |
| 247 | HWHGZ51 | Im- | Highly preferred indications include immunological disorders such | Daudi | CIS3 | gb\|AB006967\|AB006967 |
| | | mune | as described herein under the heading “Immune Activity” and/or | | CXCR3 | gb\|Z79783\|HSCKRL2 |
| | | | “Blood-Related Disorders” (particularly including, but not limited | | ICAM | gb\|X06990\|HSICAM1 |
| | | | to, immune disorders involving the B-cells). Highly preferred | | | |
| | | | embodiments of the invention include methods of preventing, | | | |
| | | | detecting, diagnosing, treating and/or ameliorating disorders of the | | | |
| | | | immune system (particularly including, but not limited to, immune | | | |
| | | | disorders involving B-cells). (The Daudi cell line is a human B | | | |
| | | | lymphoblast cell line available through the ATCC as cell line | | | |
| | | | number CCL-213). | | | |
| 247 | HWHGZ51 | Im- | Highly preferred indications include immunological disorders such | H9 | IL5 | gb\|X12705\|HSBCDFIA |
| | | mune | as described herein under the heading “Immune Activity” and/or | | VCAM | gb\|A30922\|A30922 |
| | | | “Blood-Related Disorders” (particularly including, but not limited | | VLA4 | gb\|X16983\|HSINTAL4 |
| | | | to, immune disorders involving the T-cells). Highly preferred | | | |
| | | | embodiments of the invention include methods of preventing, | | | |
| | | | detecting, diagnosing, treating and/or ameliorating disorders of the | | | |
| | | | immune system (particularly including, but not limited to, immune | | | |
| | | | disorders involving T-cells). (The H9 cell line is a human T | | | |
| | | | lymphocyte cell line available through the ATCC as cell line | | | |
| | | | number HTB-176). | | | |
| 247 | HWHGZ51 | Im- | Highly preferred indications include immunological disorders such | HEK293 | Rag1 | gb\|M29474\|HUMRAG1 |
| | | mune | as described herein under the heading “Immune Activity” and/or | | TNF | gb\|AJ270944\|HSA27094 |
| | | | “Blood-Related Disorders” (particularly including, but not limited | | | |
| | | | to, immune disorders involving epithelial cells or the renal system). | | | |
| | | | Highly preferred embodiments of the invention include methods of | | | |
| | | | preventing, detecting, diagnosing, treating and/or ameliorating | | | |
| | | | disorders of the immune system (particularly including, but not | | | |
| | | | limited to, immune disorders involving epithelial cells or the renal | | | |
| | | | system). (The 293 cell line is a human embryonal kidney epithelial | | | |
| | | | cell line available through the ATCC as cell line number CRL- | | | |
| | | | 1573). | | | |
| 247 | HWHGZ51 | Im- | Highly preferred indications include immunological disorders such | HUVEC | CCR7 | gb\|X84702\|HSDNABLR2 |
| | | mune | as described herein under the heading “Immune Activity” and/or | | GATA3 | gb\|X55037\|HSGATA3 |
| | | | “Blood-Related Disorders” (particularly including, but not limited | | TNF | gb\|AJ270944\|HSA27094 |
| | | | to, immune disorders involving endothelial cells). Highly preferred | | | |
| | | | embodiments of the invention include methods of preventing, | | | |
| | | | detecting, diagnosing, treating and/or ameliorating disorders of the | | | |
| | | | immune system (particularly including, but not limited to, immune | | | |
| | | | disorders involving endothelial cells). (HUVEC cells are human | | | |
| | | | umbilical vein endothelial cells). | | | |
| 247 | HWHGZ51 | Im- | Highly preferred indications include immunological disorders such | Jurkat | Rag1 | gb\|M29474\|HUMRAG1 |
| | | mune | as described herein under the heading “Immune Activity” and/or | | Rag2 | gb\|AY011962\|AY011962 |
| | | | “Blood-Related Disorders” (particularly including, but not limited | | | |
| | | | to, immune disorders involving T-cells). Highly preferred | | | |
| | | | embodiments of the invention include methods of preventing, | | | |
| | | | detecting, diagnosing, treating and/or ameliorating disorders of the | | | |
| | | | immune system (particularly including, but not limited to, immune | | | |
| | | | disorders involving T-cells). (The Jurkat cell line is a human T | | | |
| | | | lymphocyte cell line available through the ATCC as cell line | | | |
| | | | number TIB-152). | | | |
| 247 | HWHGZ51 | Im- | Highly preferred indications include immunological disorders such | Liver | CCR7 | gb\|X84702\|HSDNABLR2 |
| | | mune | as described herein under the heading “Immune Activity” and/or | | ICAM | gb\|X06990\|HSICAM1 |
| | | | “Blood-Related Disorders” (particularly including, but not limited | | TNF | gb\|AJ270944\|HSA27094 |
| | | | to, immune disorders involving cells of the hepatic system). Highly | | VCAM | gb\|A30922\|A30922 |
| | | | preferred embodiments of the invention include methods of | | | |
| | | | preventing, detecting, diagnosing, treating and/or ameliorating | | | |
| | | | disorders of the immune system (particularly including, but not | | | |
| | | | limited to, immune disorders involving cells of the hepatic system). | | | |
| 247 | HWHGZ51 | Im- | Highly preferred indications include immunological disorders such | Molt4 | CD25 | gb\|X03137\|HSIL2RG7 |
| | | mune | as described herein under the heading “Immune Activity” and/or | | TNF | gb\|AJ270944\|HSA27094 |
| | | | “Blood-Related Disorders” (particularly including, but not limited | | VCAM | gb\|A30922\|A30922 |
| | | | to, immune disorders involving T-cells). Highly preferred | | | |
| | | | embodiments of the invention include methods of preventing, | | | |
| | | | detecting, diagnosing, treating and/or ameliorating disorders of the | | | |
| | | | immune system (particularly including, but not limited to, immune | | | |
| | | | disorders involving T-cells). (The Molt-4 cell line is a human T-cell | | | |
| | | | line available through the ATCC as cell line number CRL-1582). | | | |
| 247 | HWHGZ51 | Im- | Highly preferred indications include immunological disorders such | NHDF | CCR7 | gb\|X84702\|HSDNABLR2 |
| | | mune | as described herein under the heading “Immune Activity” and/or | | CD40 | gb\|AJ300189\|HSA30018 |
| | | | “Blood-Related Disorders” (particularly including, but not limited | | GATA3 | gb\|X55037\|HSGATA3 |
| | | | to, immune disorders involving the skin). Highly preferred | | HLA-c | gb\|AJ270944\|HSA27094 |
| | | | embodiments of the invention include methods of preventing, | | TNF | |
| | | | detecting, diagnosing, treating and/or ameliorating disorders of the | | | |
| | | | immune system (particularly including, but not limited to, immune | | | |
| | | | disorders involving the skin). (NHDF cells are normal human | | | |
| | | | dermal fibroblasts). | | | |
| 247 | HWHGZ51 | Im- | Highly preferred indications include immunological disorders such | SK-N-MC | CIS3 | gb\|AB006967\|AB006967 |
| | | mune | as described herein under the heading “Immune Activity” and/or | neuro- | LTBR | gb\|AK027080\|AK027080 |
| | | | “Blood-Related Disorders” (particularly including, but not limited | blastoma | Rag1 | gb\|M29474\|HUMRAG1 |
| | | | to, immune disorders involving the central nervous system). | | | |
| | | | Highly preferred embodiments of the invention include methods of | | | |
| | | | preventing, detecting, diagnosing, treating and/or ameliorating | | | |
| | | | disorders of the immune system (particularly including, but not | | | |
| | | | limited to, immune disorders involving the central nervous sytem). | | | |
| | | | (The SK-N-MC neuroblastoma cell line is a cell line derived from | | | |
| | | | human brain tissue and is available through the ATCC as cell line | | | |
| | | | number HTB-10). | | | |
| 247 | HWHGZ51 | Im- | Highly preferred indications include immunological disorders such | SUPT | CCR4 | gb\|AB023888\|AB023888 |
| | | mune | as described herein under the heading “Immune Activity” and/or | | Rag1 | gb\|M29474\|HUMRAG1 |
| | | | “Blood-Related Disorders” (particularly including, but not limited | | TNF | gb\|AJ270944\|HSA27094 |
| | | | to, immune disorders involving T-cells). Highly preferred | | | |
| | | | embodiments of the invention include methods of preventing, | | | |
| | | | detecting, diagnosing, treating and/or ameliorating disorders of the | | | |
| | | | immune system (particularly including, but not limited to, immune | | | |
| | | | disorders involving T-cells). (The SUPT cell line is a human T-cell | | | |
| | | | line). | | | |
| 247 | HWHGZ51 | Im- | Highly preferred indications include immunological disorders such | THP1 | c-maf | gb\|AF055377\|AF055377 |
| | | mune | as described herein under the heading “Immune Activity” and/or | | CCR7 | gb\|X84702\|HSDNABLR2 |
| | | | “Blood-Related Disorders” (particularly including, but not limited | | CXCR3 | gb\|Z79783\|HSCKRL2 |
| | | | to, immune disorders involving monocytes). Highly preferred | | IL5 | gb\|X12705\|HSBCDFIA |
| | | | embodiments of the invention include methods of preventing, | | | |
| | | | detecting, diagnosing, treating and/or ameliorating disorders of the | | | |
| | | | immune system (particularly including, but not limited to, immune | | | |
| | | | disorders involving monocytes). (The THP1 cell line is a human | | | |
| | | | monocyte cell line available through the ATCC as cell line number | | | |
| | | | TIB-202). | | | |
| 247 | HWHGZ51 | Im- | Highly preferred indications include immunological disorders such | U937 | CD69 | gb\|Z22576\|HSCD69GNA |
| | | mune | as described herein under the heading “Immune Activity” and/or | | ICAM | gb\|X06990\|HSICAM1 |
| | | | “Blood-Related Disorders” (particularly including, but not limited | | TNF | gb\|AJ270944\|HSA27094 |
| | | | to, immune disorders involving monocytes). Highly preferred | | | |
| | | | embodiments of the invention include methods of preventing, | | | |
| | | | detecting, diagnosing, treating and/or ameliorating disorders of the | | | |
| | | | immune system (particularly including, but not limited to, immune | | | |
| | | | disorders involving monocytes). (The U937 cell line is a human | | | |
| | | | monocyte cell line available through the ATCC as cell line number | | | |
| | | | CRL-1593.2). | | | |

[0127] Table 2 further characterizes certain encoded polypeptides of the invention, by providing the results of comparisons to protein and protein family databases. The first column provides a unique clone identifier, “Clone ID NO:”, corresponding to a cDNA clone disclosed in Table 1A and/or Table 1B. The second column provides the unique contig identifier, “Contig ID:” which allows correlation with the information in Table 1B. The third column provides the sequence identifier, “SEQ ID NO:”, for the contig polynucleotide sequences. The fourth column provides the analysis method by which the homology/identity disclosed in the Table was determined. The fifth column provides a description of the PFAM/NR hit identified by each analysis. Column six provides the accession number of the PFAM/NR hit disclosed in the fifth column. Column seven, score/percent identity, provides a quality score or the percent identity, of the hit disclosed in column five. Comparisons were made between polypeptides encoded by polynucleotides of the invention and a non-redundant protein database (herein referred to as “NR”), or a database of protein families (herein referred to as “PFAM”), as described below.

[0128] The NR database, which comprises the NBRF PIR database, the NCBI GenPept database, and the SIB SwissProt and TrEMBL databases, was made non-redundant using the computer program nrdb2 (Warren Gish, Washington University in Saint Louis). Each of the polynucleotides shown in Table 1B, column 3 (e.g., SEQ ID NO:X or the ‘Query’ sequence) was used to search against the NR database. The computer program BLASTX was used to compare a 6-frame translation of the Query sequence to the NR database (for information about the BLASTX algorithm please see Altshul et al., J. Mol. Biol. 215:403-410 (1990), and Gish and States, Nat. Genet. 3:266-272 (1993). A description of the sequence that is most similar to the Query sequence (the highest scoring ‘Subject’) is shown in column five of Table 2 and the database accession number for that sequence is provided in column six. The highest scoring ‘Subject’ is reported in Table 2 if (a) the estimated probability that the match occurred by chance alone is less than 1.0e-07, and (b) the match was not to a known repetitive element. BLASTX returns alignments of short polypeptide segments of the Query and Subject sequences which share a high degree of similarity; these segments are known as High-Scoring Segment Pairs or HSPs. Table 2 reports the degree of similarity between the Query and the Subject for each HSP as a percent identity in Column 7. The percent identity is determined by dividing the number of exact matches between the two aligned sequences in the HSP, dividing by the number of Query amino acids in the HSP and multiplying by 100. The polynucleotides of SEQ ID NO:X which encode the polypeptide sequence that generates an HSP are delineated by columns 8 and 9 of Table 2.

[0129] The PFAM database, PFAM version 2.1, (Sonnhammer, Nucl. Acids Res., 26:320-322, 1998)) consists of a series of multiple sequence alignments; one alignment for each protein family. Each multiple sequence alignment is converted into a probability model called a Hidden Markov Model, or HMM, that represents the position-specific variation among the sequences that make up the multiple sequence alignment (see, e.g., Durbin, et al., Biological sequence analysis: probabilistic models of proteins and nucleic acids, Cambridge University Press, 1998 for the theory of HMMs). The program HMMER version 1.8 (Sean Eddy, Washington University in Saint Louis) was used to compare the predicted protein sequence for each Query sequence (SEQ ID NO:Y in Table 1B) to each of the HMMs derived from PFAM version 2.1. A HMM derived from PFAM version 2.1 was said to be a significant match to a polypeptide of the invention if the score returned by HMMER 1.8 was greater than 0.8 times the HMMER 1.8 score obtained with the most distantly related known member of that protein family. The description of the PFAM family which shares a significant match with a polypeptide of the invention is listed in column 5 of Table 2, and the database accession number of the PFAM hit is provided in column 6. Column 7 provides the score returned by HMMER version 1.8 for the alignment. Columns 8 and 9 delineate the polynucleotides of SEQ ID NO:X which encode the polypeptide sequence which show a significant match to a PFAM protein family.

[0130] As mentioned, columns 8 and 9 in Table 2, “NT From” and “NT To”, delineate the polynucleotides of “SEQ ID NO:X” that encode a polypeptide having a significant match to the PFAM/NR database as disclosed in the fifth column. In one embodiment, the invention provides a protein comprising, or alternatively consisting of, a polypeptide encoded by the polynucleotides of SEQ ID NO:X delineated in columns 8 and 9 of Table 2. Also provided are polynucleotides encoding such proteins, and the complementary strand thereto.

[0131] The nucleotide sequence SEQ ID NO:X and the translated SEQ ID NO:Y are sufficiently accurate and otherwise suitable for a variety of uses well known in the art and described further below. For instance, the nucleotide sequences of SEQ ID NO:X are useful for designing nucleic acid hybridization probes that will detect nucleic acid sequences contained in SEQ ID NO:X or the cDNA contained in ATCC Deposit No:Z. These probes will also hybridize to nucleic acid molecules in biological samples, thereby enabling immediate applications in chromosome mapping, linkage analysis, tissue identification and/or typing, and a variety of forensic and diagnostic methods of the invention. Similarly, polypeptides identified from SEQ ID NO:Y may be used to generate antibodies which bind specifically to these polypeptides, or fragments thereof, and/or to the polypeptides encoded by the cDNA clones identified in, for example, Table 1A and/or 1B.

[0132] Nevertheless, DNA sequences generated by sequencing reactions can contain sequencing errors. The errors exist as misidentified nucleotides, or as insertions or deletions of nucleotides in the generated DNA sequence. The erroneously inserted or deleted nucleotides cause frame shifts in the reading frames of the predicted amino acid sequence. In these cases, the predicted amino acid sequence diverges from the actual amino acid sequence, even though the generated DNA sequence may be greater than 99.9% identical to the actual DNA sequence (for example, one base insertion or deletion in an open reading frame of over 1000 bases).

[0133] Accordingly, for those applications requiring precision in the nucleotide sequence or the amino acid sequence, the present invention provides not only the generated nucleotide sequence identified as SEQ ID NO:X, and a predicted translated amino acid sequence identified as SEQ ID NO:Y, but also a sample of plasmid DNA containing cDNA ATCC Deposit No:Z (e.g., as set forth in columns 2 and 3 of Table 1A and/or as set forth, for example, in Table 1B, 6, and 7). The nucleotide sequence of each deposited clone can readily be determined by sequencing the deposited clone in accordance with known methods. Further, techniques known in the art can be used to verify the nucleotide sequences of SEQ ID NO:X. The predicted amino acid sequence can then be verified from such deposits. Moreover, the amino acid sequence of the protein encoded by a particular clone can also be directly determined by peptide sequencing or by expressing the protein in a suitable host cell containing the deposited human cDNA, collecting the protein, and determining its sequence.

TABLE 2

| | | SEQ | | | | Score/ | | |
|---|---|---|---|---|---|---|---|---|
| cDNA Clone | Contig | ID | Analysis | | PFam/NR Accession | Percent | NT | |
| ID | ID: | NO: X | Method | PFam/NR Description | Number | Identity | From | NT To |
| H2CBU83 | 884134 | 11 | WUblastx.64 | (Q9NYD1) G-PROTEIN- | Q9NYD1 | 100% | 10 | 777 |
| | | | | COUPLED RECEPTOR | | | | |
| | | | | 48. | | | | |
| H2CBU83 | 745366 | 262 | WUblastx.64 | (Q9NYD1) G-PROTEIN- | Q9NYD1 | 98% | 291 | 776 |
| | | | | COUPLED RECEPTOR | | 44% | 151 | 204 |
| | | | | 48. | | 100% | 10 | 297 |
| HACBD91 | 637482 | 13 | WUblastx.64 | NADH dehydrogenase | pir\|JE0383\|JE0383 | 100% | 211 | 357 |
| | | | | (ubiquinone) (EC 1.6.5.3) | | 95% | 1306 | 1368 |
| | | | | chain NDUFB4 - human | | | | |
| HACCI17 | 891114 | 14 | HMMER | PFAM: PMP- | PF00822 | 142.7 | 470 | 1003 |
| | | | 2.1.1 | 22/EMP/MP20/Claudin | | | | |
| | | | | family | | | | |
| | | | WUblastx.64 | (Q8WUW3) Hypothetical | Q8WUW3 | 100% | 317 | 1114 |
| | | | | 27.7 kDa protein | | | | |
| | | | | (Fragment). | | | | |
| HACCI17 | 731877 | 263 | HMMER | PFAM: PMP- | PF00822 | 35.6 | 144 | 329 |
| | | | 2.1.1 | 22/EMP/MP20/Claudin | | | | |
| | | | | family | | | | |
| | | | WUblastx.64 | (Q8WUW3) Hypothetical | Q8WUW3 | 80% | 24 | 329 |
| | | | | 27.7 kDa protein | | 57% | 454 | 495 |
| | | | | (Fragment). | | 90% | 1 | 96 |
| | | | | | | 30% | 66 | 296 |
| | | | | | | 75% | 535 | 786 |
| | | | | | | 100% | 311 | 619 |
| HAGAQ26 | 561996 | 15 | WUblastx.64 | (Q9UKG4) | Q9UKG4 | 99% | 414 | 1001 |
| | | | | NA+/SULFATE | | 93% | 2 | 433 |
| | | | | COTRANSPORTER | | | | |
| | | | | SUT-1. | | | | |
| HAHDB16 | 635412 | 18 | WUblastx.64 | (Q9GMK2) | Q9GMK2 | 75% | 641 | 522 |
| | | | | HYPOTHETICAL 10.0 KDA | | 69% | 762 | 634 |
| | | | | PROTEIN. | | | | |
| HAICP19 | 422672 | 19 | WUblastx.64 | (Q9H173) SIL1 | Q9H173 | 100% | 83 | 1465 |
| | | | | PROTEIN PRECURSOR. | | | | |
| HAJAN23 | 1352364 | 21 | WUblastx.64 | (Q9HCC0) NON-BIOTIN | Q9HCC0 | 100% | 109 | 1797 |
| | | | | CONTAINING | | | | |
| | | | | SUBUNIT OF 3- | | | | |
| | | | | METHYLCROTONYL- | | | | |
| | | | | COA CARBOX | | | | |
| HAJAN23 | 872551 | 265 | HMMER | PFAM: Carboxyl | PF01039 | 126.6 | 294 | 617 |
| | | | 2.1.1 | transferase domain | | | | |
| | | | WUblastx.64 | (Q9HCC0) NON-BIOTIN | Q9HCC0 | 91% | 120 | 665 |
| | | | | CONTAINING | | 96% | 557 | 1807 |
| | | | | SUBUNIT OF 3- | | | | |
| | | | | METHYLCROTONYL- | | | | |
| | | | | COA CARBOX | | | | |
| HAJBR69 | 638516 | 22 | WUblastx.64 | (Q9JIG5) UBIQUITIN | Q9JIG5 | 69% | 677 | 48 |
| | | | | SPECIFIC PROTEASE | | | | |
| | | | | (FRAGMENT). | | | | |
| HAMFE15 | 905695 | 23 | HMMER | PFAM: Diacylglycerol | PF00781 | 22.9 | 1807 | 1956 |
| | | | 2.1.1 | kinase catalytic domain | | | | |
| | | | | (presumed) | | | | |
| | | | WUblastx.64 | (Q9NP48) PUTATIVE | Q9NP48 | 93% | 1495 | 2757 |
| | | | | LIPID KINASE (CDNA | | | | |
| | | | | FLJ10842 FIS, CLONE | | | | |
| | | | | NT2RP4001343 | | | | |
| HAMFE15 | 823350 | 266 | WUblastx.64 | (Q9NP48) PUTATIVE | Q9NP48 | 93% | 1503 | 2756 |
| | | | | LIPID KINASE (CDNA | | | | |
| | | | | FLJ10842 FIS, CLONE | | | | |
| | | | | NT2RP4001343 | | | | |
| HAMGR28 | 892971 | 24 | WUblastx.64 | (AAH07438) Similar to | AAH07438 | 100% | 59 | 823 |
| | | | | RIKEN cDNA | | | | |
| | | | | 2610511E22 gene. | | | | |
| HAMGR28 | 748223 | 267 | WUblastx.64 | (AAH07438) Similar to | AAH07438 | 100% | 569 | 766 |
| | | | | RIKEN cDNA | | 100% | 1 | 567 |
| | | | | 2610511E22 gene. | | | | |
| HAPBS03 | 656755 | 25 | WUblastx.64 | (Q99KG1) SIMILAR TO | Q99KG1 | 51% | 59 | 175 |
| | | | | HETEROGENEOUS | | 85% | 593 | 655 |
| | | | | NUCLEAR | | 62% | 643 | 777 |
| | | | | RIBONUCLEOPROTEIN | | | | |
| | | | | R (FRAGME | | | | |
| HAPOM49 | 769555 | 27 | WUblastx.64 | (Q9BZM1) GROUP XII | Q9BZM1 | 99% | 251 | 817 |
| | | | | SECRETED | | | | |
| | | | | PHOSPHOLIPASE A2. | | | | |
| HAPOM49 | 722386 | 268 | WUblastx.64 | (Q9BZM1) GROUP XII | Q9BZM1 | 100% | 251 | 451 |
| | | | | SECRETED | | 100% | 454 | 816 |
| | | | | PHOSPHOLIPASE A2. | | | | |
| HAPUC89 | 834358 | 28 | WUblastx.64 | (Q9BUM1) UNKNOWN | Q9BUM1 | 99% | 109 | 804 |
| | | | | (PROTEIN FOR | | | | |
| | | | | IMAGE: 3050476) | | | | |
| | | | | (FRAGMENT). | | | | |
| HATBR65 | 635514 | 29 | WUblastx.64 | (Q96NR6) CDNA | Q96NR6 | 42% | 750 | 806 |
| | | | | FLJ30278 fis, clone | | 64% | 617 | 751 |
| | | | | BRACE2002755. | | | | |
| HAUAI83 | 639009 | 30 | WUblastx.64 | (BAB27250) 13 days | BAB27250 | 88% | 160 | 399 |
| | | | | embryo liver cDNA, | | 90% | 25 | 84 |
| | | | | RIKEN full-le | | 100% | 489 | 557 |
| HAUAI83 | 383592 | 269 | WUblastx.64 | (BAB27250) 13 days | BAB27250 | 100% | 406 | 723 |
| | | | | embryo liver cDNA, | | | | |
| | | | | RIKEN full-le | | | | |
| HBGBA69 | 1352289 | 32 | WUblastx.64 | (Q8WVV8) Hypothetical | Q8WVV8 | 100% | 220 | 843 |
| | | | | 22.4 kDa protein | | | | |
| | | | | (Fragment). | | | | |
| HBGBA69 | 709658 | 270 | WUblastx.64 | (Q8WVV8) Hypothetical | Q8WVV8 | 78% | 158 | 226 |
| | | | | 22.4 kDa protein | | 100% | 211 | 780 |
| | | | | (Fragment). | | | | |
| HBGNU56 | 1352412 | 33 | WUblastx.64 | (Q96DB9) FXYD | FXY5_HUMAN | 100% | 125 | 637 |
| | | | | domain-containing ion | | | | |
| | | | | transport regulator 5 p | | | | |
| HBGNU56 | 1094642 | 271 | HMMER | PFAM: | PF02038 | 70.5 | 475 | 609 |
| | | | 2.1.1 | ATP1G1/PLM/MAT8 | | | | |
| | | | | family | | | | |
| | | | WUblastx.64 | (Q96DB9) FXYD | FXY5_HUMAN | 100% | 79 | 612 |
| | | | | domain-containing ion | | | | |
| | | | | transport regulator 5 p | | | | |
| HBGNU56 | 1050255 | 272 | HMMER | PFAM: | PF02038 | 70.5 | 521 | 655 |
| | | | 2.1.1 | ATP1G1/PLM/MAT8 | | | | |
| | | | | family | | | | |
| | | | WUblastx.64 | (Q96DB9) FXYD | FXY5_HUMAN | 100% | 125 | 658 |
| | | | | domain-containing ion | | | | |
| | | | | transport regulator 5 p | | | | |
| HBIAE26 | 514418 | 34 | WUblastx.64 | (AAK55521) PRO0764. | AAK55521 | 83% | 1009 | 974 |
| | | | | | | 65% | 983 | 744 |
| HBINS58 | 1352386 | 35 | WUblastx.64 | (Q9D6W7) | Q9D6W7 | 81% | 57 | 578 |
| | | | | 2310047N01RIK | | | | |
| | | | | PROTEIN. | | | | |
| HBINS58 | 961712 | 273 | WUblastx.64 | (Q9D6W7) | Q9D6W7 | 80% | 71 | 589 |
| | | | | 2310047N01RIK | | | | |
| | | | | PROTEIN. | | | | |
| HBINS58 | 892924 | 274 | WUblastx.64 | (Q9D6W7) | Q9D6W7 | 79% | 100 | 579 |
| | | | | 2310047N01RIK | | | | |
| | | | | PROTEIN. | | | | |
| HBJFU48 | 460392 | 36 | WUblastx.64 | (Q9P195) PRO1722. | Q9P195 | 63% | 716 | 660 |
| | | | | | | 73% | 819 | 718 |
| | | | | | | 64% | 667 | 533 |
| HCE2F54 | 634016 | 39 | HMMER | PFAM: Histone-like | PF00808 | 19 | 868 | 1005 |
| | | | 2.1.1 | transcription factor | | | | |
| | | | | (CBF/NF-Y) and archaeal | | | | |
| | | | | histone | | | | |
| | | | WUblastx.64 | (AAH07642) Unknown | AAH07642 | 82% | 298 | 1122 |
| | | | | (protein for | | | | |
| | | | | IMAGE: 3534358) (Fra | | | | |
| HCE3G69 | 728432 | 40 | WUblastx.64 | (Q9H0K7) | Q9H0K7 | 100% | 1294 | 1647 |
| | | | | HYPOTHETICAL 12.4 KDA | | | | |
| | | | | PROTEIN | | | | |
| | | | | (UNKNOWN) | | | | |
| | | | | (PROTEIN FOR | | | | |
| | | | | MGC: 303 | | | | |
| HCE3G69 | 494346 | 275 | WUblastx.64 | (Q9H0K7) | Q9H0K7 | 100% | 1295 | 1648 |
| | | | | HYPOTHETICAL 12.4 KDA | | | | |
| | | | | PROTEIN | | | | |
| | | | | (UNKNOWN) | | | | |
| | | | | (PROTEIN FOR | | | | |
| | | | | MGC: 303 | | | | |
| HCE5F43 | 612796 | 41 | WUblastx.64 | (Q9H8M7) CDNA | Q9H8M7 | 100% | 9 | 53 |
| | | | | FLJ13397 FIS, CLONE | | 100% | 56 | 928 |
| | | | | PLACE1001351. | | | | |
| HCEFB80 | 1143407 | 42 | WUblastx.64 | (Q96FR3) Unknown | Q96FR3 | 100% | 1785 | 1979 |
| | | | | (protein for MGC: 18083). | | | | |
| HCEFB80 | 1046853 | 276 | WUblastx.64 | (Q96FR3) Unknown | Q96FR3 | 100% | 1777 | 1971 |
| | | | | (protein for MGC: 18083). | | | | |
| HCEWE20 | 543370 | 44 | WUblastx.64 | (Q9P1J1) PRO1546. | Q9P1J1 | 76% | 501 | 551 |
| | | | | | | 79% | 601 | 717 |
| HCFOM18 | 553582 | 45 | WUblastx.64 | (Q9H728) CDNA: | Q9H728 | 60% | 621 | 490 |
| | | | | FLJ21463 FIS, CLONE | | | | |
| | | | | COL04765. | | | | |
| HCGMD59 | 636078 | 46 | WUblastx.64 | catalase (EC 1.11.1.6) - | pir\|I40767\|I40767 | 97% | 296 | 186 |
| | | | | Campylobacter jejuni | | | | |
| HCNDR47 | 1016919 | 47 | WUblastx.64 | (BAB84904) FLJ00149 | BAB84904 | 93% | 969 | 1154 |
| | | | | protein (Fragment). | | 42% | 180 | 263 |
| HCNDR47 | 863677 | 277 | WUblastx.64 | (Q24333) ELASTIN | Q24333 | 57% | 42 | 197 |
| | | | | LIKE PROTEIN | | | | |
| | | | | (FRAGMENT). | | | | |
| HCNDR47 | 874128 | 278 | WUblastx.64 | (BAB84904) FLJ00149 | BAB84904 | 93% | 148 | 333 |
| | | | | protein (Fragment). | | | | |
| HCWDS72 | 707833 | 52 | WUblastx.64 | conserved hypothetical | pir\|D83454\|D83454 | 77% | 318 | 4 |
| | | | | protein PA1527 | | | | |
| | | | | [imported] - Pseudomonas | | | | |
| | | | | aeruginosa (strain PAO1) | | | | |
| HCWKC15 | 553621 | 53 | WUblastx.64 | (Q9NX85) CDNA | Q9NX85 | 77% | 538 | 419 |
| | | | | FLJ20378 FIS, CLONE | | 56% | 710 | 663 |
| | | | | KAIA0536. | | 63% | 708 | 532 |
| HCWUM50 | 639037 | 54 | WUblastx.64 | (Q9NWD1) | Q9NWD1 | 94% | 2 | 175 |
| | | | | HYPOTHETICAL 61.6 KDA | | 73% | 1103 | 1303 |
| | | | | PROTEIN. | | | | |
| HDABR72 | 1301517 | 55 | WUblastx.64 | (Q9BTK4) UNKNOWN | Q9BTK4 | 100% | 695 | 886 |
| | | | | (PROTEIN FOR | | | | |
| | | | | MGC: 4663). | | | | |
| HDABR72 | 748225 | 280 | HMMER | PFAM: Cytochrome P450 | PF00067 | 21.7 | 145 | 282 |
| | | | 2.1.1 | | | | | |
| | | | WUblastx.64 | (Q9BTK4) UNKNOWN | Q9BTK4 | 100% | 690 | 881 |
| | | | | (PROTEIN FOR | | | | |
| | | | | MGC: 4663). | | | | |
| HDPBA28 | 1062783 | 56 | WUblastx.64 | (Q9UKY2) | Q9UKY2 | 99% | 259 | 3081 |
| | | | | ADIPOCYTE-DERIVED | | | | |
| | | | | LEUCINE | | | | |
| | | | | AMINOPEPTIDASE. | | | | |
| HDPBA28 | 866429 | 281 | HMMER | PFAM: Peptidase family | PF01433 | 613.6 | 228 | 1391 |
| | | | 2.1.1 | M1 | | | | |
| | | | WUblastx.64 | (Q9UKY2) | Q9UKY2 | 99% | 69 | 2891 |
| | | | | ADIPOCYTE-DERIVED | | | | |
| | | | | LEUCINE | | | | |
| | | | | AMINOPEPTIDASE. | | | | |
| HDPBI32 | 1352360 | 57 | WUblastx.64 | (O88407) NEURAL | O88407 | 92% | 37 | 984 |
| | | | | MEMBRANE PROTEIN | | | | |
| | | | | 35. | | | | |
| HDPBI32 | 862851 | 282 | WUblastx.64 | (O88407) NEURAL | O88407 | 95% | 599 | 1051 |
| | | | | MEMBRANE PROTEIN | | 89% | 103 | 603 |
| | | | | 35. | | | | |
| HDPBI32 | 590733 | 283 | HMMER | PFAM: Uncharacterized | PF01027 | 126.8 | 51 | 461 |
| | | | 2.1.1 | protein family | | | | |
| HDPCJ91 | 740748 | 58 | WUblastx.64 | (Q9H387) PRO2550. | Q9H387 | 53% | 2369 | 2407 |
| | | | | | | 56% | 2377 | 2676 |
| HDPCL63 | 1019008 | 59 | WUblastx.64 | (Q9Y519) | Q9Y519 | 99% | 14 | 835 |
| | | | | HYPOTHETICAL 42.3 KDA | | | | |
| | | | | PROTEIN. | | | | |
| HDPCL63 | 847045 | 284 | WUblastx.64 | (Q9Y519) | Q9Y519 | 97% | 2 | 730 |
| | | | | HYPOTHETICAL 42.3 KDA | | | | |
| | | | | PROTEIN. | | | | |
| HDPGT01 | 771583 | 61 | WUblastx.64 | (Q9Y2B3) LCAT-LIKE | Q9Y2B3 | 100% | 8 | 262 |
| | | | | PROTEIN (LLPL). | | 100% | 264 | 1244 |
| HDPJM30 | 879325 | 63 | WUblastx.64 | (O94759) LONG | TRL2_HUMAN | 99% | 17 | 1633 |
| | | | | TRANSIENT | | | | |
| | | | | RECEPTOR | | | | |
| | | | | POTENTIAL CHANNEL | | | | |
| | | | | 2 (LTRPC | | | | |
| HDPJM30 | 603517 | 286 | WUblastx.64 | (O94759) LONG | TRL2_HUMAN | 89% | 416 | 1312 |
| | | | | TRANSIENT | | 96% | 378 | 530 |
| | | | | RECEPTOR | | 98% | 1 | 378 |
| | | | | POTENTIAL CHANNEL | | | | |
| | | | | 2 (LTRPC | | | | |
| HDPND46 | 637586 | 64 | WUblastx.64 | (Q9BR26) DJ257E24.3 | Q9BR26 | 81% | 12 | 1466 |
| | | | | (NOVEL PROTEIN) | | | | |
| | | | | (FRAGMENT). | | | | |
| HDPOJ08 | 731863 | 65 | WUblastx.64 | (Q9H7X1) CDNA | Q9H7X1 | 84% | 524 | 904 |
| | | | | FLJ14153 FIS, CLONE | | 30% | 315 | 479 |
| | | | | NT2RM1000092, | | 99% | 12 | 524 |
| | | | | WEAKLY SIMILAR TO | | | | |
| | | | | MUL | | | | |
| HDPPN86 | 1037893 | 66 | WUblastx.64 | (Q9BVN4) | Q9BVN4 | 77% | 5063 | 5194 |
| | | | | HYPOTHETICAL 59.4 KDA | | 100% | 919 | 1308 |
| | | | | PROTEIN. | | 97% | 1942 | 2175 |
| | | | | | | 42% | 4835 | 4891 |
| | | | | | | 47% | 4983 | 5045 |
| | | | | | | 98% | 4611 | 4799 |
| HDPPN86 | 895711 | 287 | WUblastx.64 | (Q9BVN4) | Q9BVN4 | 98% | 909 | 1817 |
| | | | | HYPOTHETICAL 59.4 KDA | | | | |
| | | | | PROTEIN. | | | | |
| HDPSB18 | 1043263 | 67 | WUblastx.64 | (Q9NX17) CDNA | Q9NX17 | 66% | 3407 | 3150 |
| | | | | FLJ20489 FIS, CLONE | | 46% | 2573 | 2478 |
| | | | | KAT08285. | | | | |
| HDPSB18 | 732097 | 290 | WUblastx.64 | (Q9NX17) CDNA | Q9NX17 | 41% | 863 | 789 |
| | | | | FLJ20489 FIS, CLONE | | 66% | 813 | 556 |
| | | | | KAT08285. | | | | |
| HDPSH53 | 1309174 | 68 | WUblastx.64 | (Q9EPY0) CASPASE | Q9EPY0 | 59% | 262 | 456 |
| | | | | RECRUITMENT | | 88% | 1023 | 1184 |
| | | | | DOMAIN PROTEIN 9. | | | | |
| HDPSH53 | 1040056 | 291 | WUblastx.64 | (Q9H257) CASPASE | Q9H257 | 100% | 1131 | 1184 |
| | | | | RECRUITMENT | | 92% | 301 | 423 |
| | | | | DOMAIN PROTEIN 9. | | 25% | 1518 | 1610 |
| | | | | | | 100% | 1010 | 1129 |
| HDPSH53 | 882768 | 292 | WUblastx.64 | (AAH08877) Caspase | AAH08877 | 98% | 316 | 480 |
| | | | | recruitment domain | | | | |
| | | | | protein 9. | | | | |
| HDPSP01 | 1352280 | 69 | WUblastx.64 | (Q9BR97) UNKNOWN | Q9BR97 | 93% | 1671 | 1718 |
| | | | | (PROTEIN FOR | | 94% | 184 | 1674 |
| | | | | MGC: 10763). | | 41% | 2196 | 2276 |
| HDPSP01 | 689129 | 293 | WUblastx.64 | (Q9BR97) UNKNOWN | Q9BR97 | 90% | 227 | 1114 |
| | | | | (PROTEIN FOR | | 98% | 1078 | 1668 |
| | | | | MGC: 10763). | | 100% | 1664 | 1744 |
| HDPSP54 | 744440 | 70 | WUblastx.64 | (BAB85063) CDNA | BAB85063 | 99% | 2 | 307 |
| | | | | FLJ23790 fis, clone | | | | |
| | | | | HEP21466. | | | | |
| HDPUH26 | 866433 | 71 | WUblastx.64 | (Q8VHE7) Hypothetical | Q8VHE7 | 80% | 261 | 1733 |
| | | | | 67.5 kDa protein. | | 69% | 162 | 290 |
| HDPUW68 | 812737 | 72 | HMMER | PFAM: Immunoglobulin | PF00047 | 38.9 | 844 | 1005 |
| | | | 2.1.1 | domain | | | | |
| | | | WUblastx.64 | (Q9Y286) QA79 | Q9Y286 | 100% | 40 | 1440 |
| | | | | MEMBRANE PROTEIN, | | | | |
| | | | | ALLELIC VARIANT | | | | |
| | | | | AIRM-1B PRECURSOR. | | | | |
| HDPWU34 | 630354 | 73 | HMMER | PFAM: POT family | PF00854 | 77.2 | 432 | 857 |
| | | | 2.1.1 | | | | | |
| | | | WUblastx.64 | (Q9P2X9) PEPTIDE | Q9P2X9 | 100% | 3 | 1091 |
| | | | | TRANSPORTER 3. | | | | |
| HDPXY01 | 879048 | 74 | WUblastx.64 | hypothetical protein | pir\|T43490\|T43490 | 93% | 3 | 743 |
| | | | | DKFZp434A139.1 - | | | | |
| | | | | human (fragments) | | | | |
| HDPXY01 | 904768 | 296 | WUblastx.64 | hypothetical protein | pir\|T43490\|T43490 | 97% | 10 | 921 |
| | | | | DKFZp434A139.1 - | | | | |
| | | | | human (fragments) | | | | |
| HDPXY01 | 895715 | 298 | WUblastx.64 | (O93251) ALPHA 1 | O93251 | 29% | 643 | 1419 |
| | | | | TYPE I COLLAGEN. | | 35% | 268 | 447 |
| HDTBV77 | 785879 | 75 | WUblastx.64 | (Q9BT94) UNKNOWN | Q9BT94 | 99% | 65 | 2137 |
| | | | | (PROTEIN FOR | | 69% | 2131 | 2169 |
| | | | | MGC: 10848). | | | | |
| HDTDQ23 | 1306984 | 76 | WUblastx.64 | calcium-binding protein | pir\|S04970\|S04970 | 100% | 1611 | 1709 |
| | | | | (clone pMP41) - mouse | | | | |
| | | | | (fragment) | | | | |
| HDTDQ23 | 879009 | 299 | WUblastx.64 | calcium-binding protein | pir\|S04970\|S04970 | 100% | 1623 | 1721 |
| | | | | (clone pMP41) - mouse | | | | |
| | | | | (fragment) | | | | |
| HDTDQ23 | 751707 | 300 | WUblastx.64 | calcium-binding protein | pir\|S04970\|S04970 | 100% | 1623 | 1721 |
| | | | | (clone pMP41) - mouse | | | | |
| | | | | (fragment) | | | | |
| HE2DE47 | 619852 | 77 | WUblastx.64 | (Q9NZN8) NOT2P | Q9NZN8 | 99% | 808 | 2427 |
| | | | | (CCR4-NOT | | | | |
| | | | | TRANSCRIPTION | | | | |
| | | | | COMPLEX, SUBUNIT | | | | |
| | | | | 2). | | | | |
| HE2NV57 | 740750 | 78 | WUblastx.64 | (Q9UGV6) BK445C9.3 | Q9UGV6 | 31% | 321 | 866 |
| | | | | (HIGH-MOBILITY | | 66% | 71 | 106 |
| | | | | GROUP (NONHISTONE | | | | |
| | | | | CHROMOSOMAL) | | | | |
| | | | | PROT | | | | |
| HE2PH36 | 570903 | 79 | WUblastx.64 | (AAH07609) Similar to | AAH07609 | 56% | 1359 | 1285 |
| | | | | hypothetical protein | | 90% | 1524 | 1492 |
| | | | | PRO1722. | | 68% | 1484 | 1353 |
| HE8DS15 | 847060 | 80 | WUblastx.64 | (Q9WVT0) SEVEN | Q9WVT0 | 80% | 1 | 270 |
| | | | | TRANSMEMBRANE | | 24% | 48 | 146 |
| | | | | RECEPTOR. | | 87% | 269 | 985 |
| HE9CO69 | 596829 | 81 | WUblastx.64 | (O95772) | O95772 | 82% | 25 | 270 |
| | | | | H_NH1021A08.1 | | | | |
| | | | | PROTEIN (UNKNOWN) | | | | |
| | | | | (PROTEIN FOR | | | | |
| | | | | MGC: 14607) (SIM | | | | |
| HE9OW20 | 1352337 | 83 | WUblastx.64 | (CAC41349) Alpha2- | CAC41349 | 95% | 129 | 1151 |
| | | | | glucosyltransferase. | | | | |
| HE9OW20 | 838598 | 302 | WUblastx.64 | (CAC41349) Alpha2- | CAC41349 | 99% | 142 | 996 |
| | | | | glucosyltransferase. | | | | |
| HE9OW20 | 834400 | 303 | WUblastx.64 | (CAC41349) Alpha2- | CAC41349 | 93% | 129 | 497 |
| | | | | glucosyltransferase. | | 95% | 449 | 1051 |
| HEEAG23 | 684254 | 84 | HMMER | PFAM: emp24/gp25L/p24 | PF01105 | 36.2 | 63 | 185 |
| | | | 2.1.1 | family | | | | |
| | | | WUblastx.64 | (AAH23041) Similar to | AAH23041 | 100% | 114 | 185 |
| | | | | RIKEN cDNA | | 99% | 406 | 780 |
| | | | | 2400003B06 gene. | | | | |
| HEOMQ63 | 603533 | 85 | WUblastx.64 | (Q9BQM3) DJ842G6.1.1 | Q9BQM3 | 100% | 1036 | 1293 |
| | | | | (NOVEL PROTEIN) | | 100% | 592 | 639 |
| | | | | (FRAGMENT). | | 99% | 635 | 937 |
| HFABG18 | 847073 | 87 | WUblastx.64 | (Q9QZE9) TM6P1. | Q9QZE9 | 95% | 53 | 253 |
| | | | | | | 88% | 237 | 797 |
| HFABH95 | 566712 | 88 | WUblastx.64 | (Q9QZH5) PUTATIVE | Q9QZH5 | 88% | 513 | 944 |
| | | | | PHOSPHATE/PHOSPHO | | 65% | 9 | 77 |
| | | | | ENOLPYRUVATE | | | | |
| | | | | TRANSLOCATOR. | | | | |
| HFAEF57 | 534142 | 89 | WUblastx.64 | (Q9HBN2) | Q9HBN2 | 47% | 601 | 425 |
| | | | | HYPOTHETICAL 15.8 KDA | | | | |
| | | | | PROTEIN. | | | | |
| HFCEB37 | 411345 | 90 | WUblastx.64 | (Q9NYC6) NEURONAL | Q9NYC6 | 94% | 4 | 204 |
| | | | | SPECIFIC | | | | |
| | | | | TRANSCRIPTION | | | | |
| | | | | FACTOR DAT1. | | | | |
| HFGAD82 | 513669 | 92 | WUblastx.64 | membrane glycoprotein | pir\|I78556\|I78556 | 92% | 249 | 410 |
| | | | | M6 - mouse | | | | |
| HFIIN69 | 1011487 | 93 | WUblastx.64 | (Q9UI86) PRO0113. | Q9UI86 | 55% | 1448 | 1281 |
| HFIIN69 | 874248 | 306 | WUblastx.64 | (Q9UI86) PRO0113. | Q9UI86 | 54% | 671 | 501 |
| HFIUR10 | 532060 | 94 | WUblastx.64 | (AAK55521) PRO0764. | AAK55521 | 47% | 369 | 307 |
| | | | | | | 75% | 497 | 411 |
| HFKFG02 | 634743 | 95 | WUblastx.64 | ISOFORM OAT1.2 OF | tr_vs\|O95742- | 89% | 11 | 265 |
| | | | | O95742 | 01\|O95742 | 100% | 253 | 564 |
| HFTBM50 | 545012 | 96 | WUblastx.64 | (Q9H8P0) CDNA | Q9H8P0 | 100% | 23 | 229 |
| | | | | FLJ13352 FIS, CLONE | | 91% | 198 | 524 |
| | | | | OVARC1002165, | | | | |
| | | | | WEAKLY SIMILAR TO | | | | |
| | | | | 3-O | | | | |
| HFXHK73 | 609826 | 99 | WUblastx.64 | (Q9H960) CDNA | Q9H960 | 58% | 1164 | 1042 |
| | | | | FLJ12988 FIS, CLONE | | 50% | 1749 | 1714 |
| | | | | NT2RP3000080. | | | | |
| HFXJX44 | 701988 | 100 | WUblastx.64 | (Q9N083) UNNAMED | Q9N083 | 57% | 1378 | 1082 |
| | | | | PORTEIN PRODUCT. | | | | |
| HFXKY27 | 634161 | 101 | WUblastx.64 | (Q9P147) PRO2822. | Q9P147 | 86% | 812 | 768 |
| | | | | | | 70% | 928 | 815 |
| HGBHI35 | 570262 | 102 | HMMER | PFAM: Enoyl-CoA | PF00378 | 184.6 | 213 | 722 |
| | | | 2.1.1 | hydratase/isomerase | | | | |
| | | | | family | | | | |
| | | | WUblastx.64 | (AAH25104) Similar to | AAH25104 | 91% | 225 | 962 |
| | | | | RIKEN cDNA | | | | |
| | | | | 1300017C12 gene. | | | | |
| HHBCS39 | 1003028 | 104 | WUblastx.64 | (Q9H763) CDNA: | Q9H763 | 98% | 17 | 601 |
| | | | | FLJ21269 FIS, CLONE | | | | |
| | | | | COL01745. | | | | |
| HHBCS39 | 883427 | 307 | WUblastx.64 | (Q9H763) CDNA: | Q9H763 | 98% | 63 | 647 |
| | | | | FLJ21269 FIS, CLONE | | | | |
| | | | | COL01745. | | | | |
| HHEAA08 | 638231 | 105 | WUblastx.64 | (Q9BVD9) UNKNOWN | Q9BVD9 | 61% | 1923 | 1870 |
| | | | | (PROTEIN FOR | | 74% | 2147 | 1923 |
| | | | | MGC: 5149). | | | | |
| HHFFJ48 | 634521 | 107 | WUblastx.64 | (Q9CWA7) | Q9CWA7 | 49% | 1362 | 1598 |
| | | | | 0610010F05RIK | | | | |
| | | | | PROTEIN | | | | |
| | | | | (FRAGMENT). | | | | |
| HHGBO91 | 520198 | 109 | WUblastx.64 | (Q96NR6) CDNA | Q96NR6 | 86% | 622 | 687 |
| | | | | FLJ30278 fis, clone | | 66% | 531 | 620 |
| | | | | BRACE2002755. | | 46% | 439 | 353 |
| | | | | | | 46% | 633 | 496 |
| HHGCM76 | 662329 | 111 | WUblastx.64 | (Q96FV2) Unknown | Q96FV2 | 94% | 7 | 114 |
| | | | | (protein for | | 98% | 378 | 536 |
| | | | | IMAGE: 3945715) | | | | |
| | | | | (Fragment). | | | | |
| HHGCM76 | 383547 | 310 | WUblastx.64 | (Q96FV2) Unknown | Q96FV2 | 94% | 7 | 114 |
| | | | | (protein for | | 98% | 378 | 536 |
| | | | | IMAGE: 3945715) | | | | |
| | | | | (Fragment). | | | | |
| HHPEN62 | 695134 | 113 | HMMER | PFAM: Peptidase family | PF01546 | 148.9 | 510 | 1535 |
| | | | 2.1.1 | M20/M25/M40 | | | | |
| | | | WUblastx.64 | (Q96KN2) Glutamate | Q96KN2 | 99% | 183 | 1706 |
| | | | | carboxypeptidase-like | | | | |
| | | | | protein 2. | | | | |
| HJABB94 | 456466 | 114 | WUblastx.64 | (Q9BWV3) PROTEIN | Q9BWV3 | 100% | 8 | 250 |
| | | | | KINASE NYD-SP15. | | 38% | 1127 | 1192 |
| | | | | | | 94% | 1227 | 1523 |
| HJACG02 | 1307789 | 115 | WUblastx.64 | (Q9HD89) CYSTEINE- | Q9HD89 | 100% | 66 | 389 |
| | | | | RICH SECRETED | | | | |
| | | | | PROTEIN (C/EBP- | | | | |
| | | | | EPSILON REGULATED | | | | |
| | | | | MYEL | | | | |
| HJACG02 | 509948 | 311 | WUblastx.64 | (Q9HD89) CYSTEINE- | Q9HD89 | 100% | 47 | 370 |
| | | | | RICH SECRETED | | | | |
| | | | | PROTEIN (C/EBP- | | | | |
| | | | | EPSILON REGULATED | | | | |
| | | | | MYEL | | | | |
| HJACG30 | 895505 | 116 | WUblastx.64 | (Q9UM21) UDP- | Q9UM21 | 96% | 291 | 389 |
| | | | | GLCNAC: A-1, 3-D- | | | | |
| | | | | MANNOSIDE B-1, 4-N- | | | | |
| | | | | ACETYLGLUCOSAMINYLTRANS | | | | |
| HJACG30 | 774300 | 313 | WUblastx.64 | (Q9D399) | Q9D399 | 80% | 220 | 297 |
| | | | | 6330415B21RIK | | | | |
| | | | | PROTEIN. | | | | |
| HJBCY35 | 719729 | 117 | WUblastx.64 | hypothetical protein | pir\|T08758\|T08758 | 100% | 1 | 1212 |
| | | | | DKFZp586J0619.1 - | | | | |
| | | | | human (fragment) | | | | |
| HJPAD75 | 651337 | 118 | WUblastx.64 | (Q9H5F8) CDNA: | Q9H5F8 | 98% | 8 | 232 |
| | | | | FLJ23476 FIS, CLONE | | | | |
| | | | | HSI14935. | | | | |
| HKABZ65 | 862030 | 119 | WUblastx.64 | (Q96LB9) Peptidoglycan | Q96LB9 | 99% | 77 | 802 |
| | | | | recognition protein-I- | | 45% | 137 | 541 |
| | | | | alpha precursor. | | | | |
| HKABZ65 | 665424 | 314 | WUblastx.64 | (Q96LB9) Peptidoglycan | Q96LB9 | 99% | 69 | 794 |
| | | | | recognition protein-I- | | 45% | 129 | 533 |
| | | | | alpha precursor. | | | | |
| HKACD58 | 1352202 | 120 | WUblastx.64 | (Q96BH2) Hypothetical | Q96BH2 | 86% | 786 | 1199 |
| | | | | 34.4 kDa protein. | | 28% | 46 | 186 |
| | | | | | | 100% | 125 | 715 |
| HKACD58 | 552465 | 315 | WUblastx.64 | (Q96BH2) Hypothetical | Q96BH2 | 86% | 795 | 1208 |
| | | | | 34.4 kDa protein. | | 28% | 43 | 183 |
| | | | | | | 88% | 122 | 724 |
| HKAEV06 | 1352263 | 121 | WUblastx.64 | (Q9NVA4) CDNA | Q9NVA4 | 99% | 501 | 1814 |
| | | | | FLJ10846 FIS, CLONE | | | | |
| | | | | NT2RP4001373. | | | | |
| HKAEV06 | 638238 | 316 | WUblastx.64 | (Q9NVA4) CDNA | Q9NVA4 | 96% | 367 | 459 |
| | | | | FLJ10846 FIS, CLONE | | 100% | 197 | 367 |
| | | | | NT2RP4001373. | | 96% | 480 | 1541 |
| HKAFT66 | 946512 | 122 | WUblastx.64 | (Q9CPS2) | Q9CPS2 | 72% | 29 | 61 |
| | | | | 4933428I03RIK | | 64% | 61 | 231 |
| | | | | PROTEIN. | | 84% | 274 | 828 |
| HKAFT66 | 889258 | 317 | WUblastx.64 | (Q9CPS2) | Q9CPS2 | 72% | 29 | 61 |
| | | | | 4933428I03RIK | | 64% | 61 | 231 |
| | | | | PROTEIN. | | 83% | 274 | 828 |
| HKAFT66 | 904790 | 318 | WUblastx.64 | (Q9CPS2) | Q9CPS2 | 80% | 298 | 555 |
| | | | | 4933428I03RIK | | 84% | 12 | 314 |
| | | | | PROTEIN. | | | | |
| HKB1E57 | 876571 | 123 | HMMER | PFAM: Uncharacterized | PF00919 | 320.5 | 178 | 843 |
| | | | 2.1.1 | protein family UPF0004 | | | | |
| | | | WUblastx.64 | (Q9BWZ5) DJ1187J4.4 | Q9BWZ5 | 99% | 1 | 879 |
| | | | | (CGI-05 PROTEIN | | | | |
| | | | | (LOC51654) SIMILAR | | | | |
| | | | | TO RAT CDK5 AC | | | | |
| HKB1E57 | 654871 | 319 | WUblastx.64 | (Q9BVG6) SIMILAR TO | Q9BVG6 | 90% | 78 | 167 |
| | | | | CGI-05 PROTEIN. | | | | |
| HKFBC53 | 1352286 | 124 | WUblastx.64 | hypothetical protein | pir\|T16084\|T16084 | 39% | 46 | 1410 |
| | | | | F16H11.1 - | | | | |
| | | | | Caenorhabditis elegans | | | | |
| HKFBC53 | 701893 | 320 | WUblastx.64 | hypothetical protein | pir\|T16084\|T16084 | 45% | 132 | 305 |
| | | | | F16H11.1 - | | 59% | 11 | 106 |
| | | | | Caenorhabditis elegans | | 50% | 82 | 129 |
| | | | | | | 37% | 566 | 673 |
| | | | | | | 37% | 293 | 1366 |
| HKFBC53 | 513190 | 321 | WUblastx.64 | hypothetical protein | pir\|T16084\|T16084 | 35% | 135 | 902 |
| | | | | F16H11.1 - | | | | |
| | | | | Caenorhabditis elegans | | | | |
| HKFBC53 | 383426 | 322 | WUblastx.64 | hypothetical protein | pir\|T16084\|T16084 | 38% | 704 | 949 |
| | | | | FL6H11.1 - | | 32% | 135 | 713 |
| | | | | Caenorhabditis elegans | | | | |
| HKGDL36 | 877489 | 125 | WUblastx.64 | (Q9UHG2) PROSAAS | Q9UHG2 | 99% | 53 | 832 |
| | | | | PRECURSOR (GRANIN- | | | | |
| | | | | LIKE | | | | |
| | | | | NEUROENDOCRINE | | | | |
| | | | | PEPTIDE PRECUR | | | | |
| HKGDL36 | 704088 | 323 | WUblastx.64 | (Q9UHG2) PROSAAS | Q9UHG2 | 82% | 99 | 830 |
| | | | | PRECURSOR (GRANIN- | | 49% | 55 | 555 |
| | | | | LIKE | | | | |
| | | | | NEUROENDOCRINE | | | | |
| | | | | PEPTIDE PRECUR | | | | |
| HKISB57 | 625956 | 126 | WUblastx.64 | (Q8WWW1) Smoothelin- | Q8WWW1 | 28% | 262 | 582 |
| | | | | B3. | | 100% | 201 | 1013 |
| | | | | | | 98% | 1107 | 1256 |
| | | | | | | 27% | 271 | 480 |
| | | | | | | 26% | 532 | 966 |
| | | | | | | 44% | 954 | 1052 |
| HKMMW74 | 581399 | 127 | WUblastx.64 | (Q8WY51) HC6. | Q8WY51 | 73% | 1784 | 1662 |
| HLDNA86 | 1352197 | 128 | WUblastx.64 | (Q9BQB6) UNKNOWN | Q9BQB6 | 100% | 238 | 726 |
| | | | | (PROTEIN FOR | | | | |
| | | | | MGC: 11276) (PROTEIN | | | | |
| | | | | FOR IMAGE: 3455200). | | | | |
| HLDNA86 | 535730 | 324 | WUblastx.64 | (Q9BQB6) UNKNOWN | Q9BQB6 | 72% | 326 | 424 |
| | | | | (PROTEIN FOR | | 83% | 217 | 339 |
| | | | | MGC: 11276) (PROTEIN | | 100% | 45 | 218 |
| | | | | FOR IMAGE: 3455200). | | | | |
| HLDQR62 | 753742 | 130 | WUblastx.64 | (Q9NQW2) | Q9NQW2 | 100% | 41 | 382 |
| | | | | PROGRESSIVE | | 99% | 376 | 1002 |
| | | | | ANKYOSIS-LIKE | | | | |
| | | | | PROTETN. | | | | |
| HLDQU79 | 740755 | 131 | WUblastx.64 | (O75477) KE04P. | O75477 | 100% | 105 | 1142 |
| HLICQ90 | 791828 | 134 | WUblastx.64 | (Q96N65) CDNA | Q96N65 | 95% | 571 | 636 |
| | | | | FLJ31349 fis, clone | | 93% | 59 | 616 |
| | | | | MESAN2000092, | | | | |
| | | | | moderately similar to | | | | |
| HLQDR48 | 1307726 | 135 | WUblastx.64 | (Q9NQZ1) | Q9NQZ1 | 86% | 296 | 406 |
| | | | | HEPATOCELLULAR | | | | |
| | | | | CARCINOMA | | | | |
| | | | | ASSOCIATED PROTEIN | | | | |
| | | | | TD26. | | | | |
| HLQDR48 | 619979 | 325 | WUblastx.64 | (AAH24408) | AAH24408 | 65% | 54 | 572 |
| | | | | Hypothetical 20.3 kDa | | 100% | 675 | 701 |
| | | | | protein (Fragment) | | | | |
| HLTHR66 | 699812 | 136 | HMMER | PFAM: PAP2 superfamily | PF01569 | 22.3 | 35 | 151 |
| | | | 2.1.1 | | | | | |
| | | | WUblastx.64 | (Q9D4F2) | Q9D4F2 | 93% | 2 | 229 |
| | | | | 4932443D16R1K | | | | |
| | | | | PROTEIN. | | | | |
| HLTIP94 | 1087335 | 137 | WUblastx.64 | (Q96DH6) Hypothetical | Q96DH6 | 80% | 579 | 740 |
| | | | | 35.2 kDa protein. | | | | |
| HLTIP94 | 1047690 | 327 | HMMER | PFAM: RNA recognition | PF00076 | 143.1 | 40 | −172 |
| | | | 2.1.1 | motif. (a.k.a. RRM, RBD, | | | | |
| | | | | or RNP domain) | | | | |
| | | | WUblastx.64 | (Q96DH6) Hypothetical | Q96DH6 | 99% | 123 | 776 |
| | | | | 35.2 kDa protein. | | | | |
| HLWAA17 | 629552 | 138 | WUblastx.64 | (Q9NY26) IRT1 | Q9NY26 | 94% | 226 | 960 |
| | | | | PROTEIN (SIMILAR TO | | 100% | 85 | 123 |
| | | | | ZINC/IRON | | | | |
| | | | | REGULATED | | | | |
| | | | | TRANSPORTER-LIK | | | | |
| HLWBK05 | 765310 | 139 | WUblastx.64 | (Q9CUS9) | Q9CUS9 | 84% | 10 | 1173 |
| | | | | 4833416I09RIK | | | | |
| | | | | PROTEIN | | | | |
| | | | | (FRAGMENT). | | | | |
| HLWBY76 | 797609 | 140 | WUblastx.64 | (AAH06651) Similar to | AAH06651 | 76% | 6 | 1127 |
| | | | | hypothetical protein | | | | |
| | | | | FLJ23153 | | | | |
| HLYAN59 | 553507 | 328 | WUblastx.64 | (AAL79706) Hypothetical | AAL79706 | 85% | 624 | 719 |
| | | | | 9.4 kDa protein. | | 93% | 639 | 728 |
| | | | | | | 82% | 617 | 721 |
| HLYES38 | 638042 | 145 | WUblastx.64 | (O95662) POT. ORF VI | O95662 | 81% | 743 | 856 |
| | | | | (FRAGMENT). | | 72% | 281 | 313 |
| | | | | | | 72% | 306 | 524 |
| | | | | | | 75% | 466 | 735 |
| | | | | | | 33% | 145 | 243 |
| HMADK33 | 561941 | 146 | WUblastx.64 | hypothetical protein | pir\|T47139\|T47139 | 87% | 394 | 417 |
| | | | | DKFZp761P2414.1 - | | 100% | 152 | 232 |
| | | | | human | | 94% | 228 | 395 |
| HMADS41 | 596831 | 147 | WUblastx.64 | (AAH07725) Ceroid- | AAH07725 | 92% | 186 | 449 |
| | | | | lipofuscinosis, neuronal 8 | | 100% | 427 | 1041 |
| | | | | (epile | | | | |
| HMAMI15 | 1352406 | 148 | WUblastx.64 | (AAL84703) Citrate lyase | AAL84703 | 99% | 4 | 1023 |
| | | | | beta subunit. | | | | |
| HMAMI15 | 1049263 | 329 | WUblastx.64 | (AAL84703) Citrate lyase | AAL84703 | 100% | 3 | 440 |
| | | | | beta subunit. | | 79% | 372 | 920 |
| HMCFY13 | 635301 | 149 | WUblastx.64 | (Q8WZ81) Chromosome | Q8WZ81 | 95% | 36 | 737 |
| | | | | 17 open reading frame 26. | | | | |
| HMEED18 | 560775 | 151 | WUblastx.64 | (Q9H651) CDNA: | Q9H651 | 99% | 34 | 696 |
| | | | | FLJ22604 FIS, CLONE | | | | |
| | | | | HSI04630 (BBP-LIKE | | | | |
| | | | | PROTEIN 2). | | | | |
| HMSDL37 | 973996 | 154 | WUblastx.64 | (Q9H743) CDNA: | Q9H743 | 66% | 1189 | 1497 |
| | | | | FLJ21394 FIS, CLONE | | 56% | 931 | 1110 |
| | | | | COL03536. | | | | |
| HMSDL37 | 895429 | 330 | WUblastx.64 | (Q9H743) CDNA: | Q9H743 | 64% | 1186 | 1494 |
| | | | | FLJ21394 FIS, CLONE | | 56% | 928 | 1107 |
| | | | | COL03536. | | | | |
| HMSDL37 | 904241 | 331 | WUblastx.64 | hypothetical protein 3 - | pir\|E41925\|E41925 | 50% | 421 | 350 |
| | | | | human | | 47% | 161 | 39 |
| HMSFI26 | 560229 | 155 | WUblastx.64 | (Q14713) POT. ORF V. | Q14713 | 57% | 1075 | 1019 |
| | | | | | | 39% | 1041 | 805 |
| HMTBI36 | 1301451 | 157 | WUblastx.64 | (Q9VZF8) CG1332 | Q9VZF8 | 56% | 958 | 2556 |
| | | | | PROTEIN. | | 36% | 2488 | 3024 |
| | | | | | | 40% | 376 | 879 |
| | | | | | | 35% | 2341 | 2550 |
| | | | | | | 27% | 2494 | 2622 |
| | | | | | | 40% | 712 | 834 |
| HMTBI36 | 866466 | 333 | HMMER | PFAM: WD domain, G- | PF00400 | 45.8 | 2490 | 2600 |
| | | | 2.1.1 | beta repeat | | | | |
| | | | WUblastx.64 | (Q9VZF8) CG1332 | Q9VZF8 | 56% | 957 | 2555 |
| | | | | PROTEIN. | | 36% | 2487 | 3023 |
| | | | | | | 40% | 375 | 878 |
| | | | | | | 35% | 2340 | 2549 |
| | | | | | | 27% | 2493 | 2621 |
| | | | | | | 40% | 711 | 833 |
| HMVBS81 | 639203 | 158 | WUblastx.64 | (O95070) 54TMP. | O95070 | 100% | 10 | 450 |
| HMWFT65 | 562063 | 160 | WUblastx.64 | (Q96AZ2) Similar to | Q96AZ2 | 67% | 1342 | 1205 |
| | | | | hypothetical protein | | | | |
| | | | | FLJ21463. | | | | |
| HNFFC43 | 753337 | 162 | WUblastx.64 | (Q969J4) Lipocalin-1 | Q969J4 | 97% | 319 | 453 |
| | | | | interacting membrane | | 66% | 428 | 769 |
| | | | | receptor (Lipocalin- | | 87% | 651 | 839 |
| | | | | interac | | 99% | 903 | 1517 |
| HNFIY77 | 634551 | 164 | WUblastx.64 | (Q8WXE6) KCCR13L. | Q8WXE6 | 96% | 866 | 1030 |
| | | | | | | 99% | 105 | 866 |
| HNFJF07 | 577013 | 165 | WUblastx.64 | (Q8WYX2) Hypothetical | Q8WYX2 | 65% | 585 | 457 |
| | | | | 14.1 kDa protein. | | | | |
| HNGEP09 | 499076 | 167 | WUblastx.64 | (AAK55521) PRO0764. | AAK55521 | 57% | 965 | 861 |
| | | | | | | 53% | 1021 | 977 |
| | | | | | | 50% | 867 | 715 |
| HNGIJ31 | 519120 | 169 | WUblastx.64 | (Q9N083) UNNAMED | Q9N083 | 73% | 566 | 610 |
| | | | | PORTEIN PRODUCT. | | 54% | 615 | 725 |
| | | | | | | 66% | 454 | 561 |
| HNGJE50 | 561568 | 170 | WUblastx.64 | (Q9HBS7) | Q9HBS7 | 64% | 1028 | 945 |
| | | | | HYPOTHETICAL 14.2 KDA | | 62% | 919 | 734 |
| | | | | PROTEIN. | | | | |
| HNGOI12 | 1041375 | 172 | WUblastx.64 | collagen alpha 1(VIII) | pir\|A34246\|A34246 | 31% | 1067 | 2092 |
| | | | | chain precursor - rabbit | | | | |
| HNHEU93 | 634851 | 173 | WUblastx.64 | (Q9H387) PRO2550. | Q9H387 | 67% | 741 | 418 |
| HNHFM14 | 664507 | 174 | WUblastx.64 | (Q9N8S9) POSSIBLE | Q9N8S9 | 74% | 6 | 122 |
| | | | | (HHV-6) U1102, | | 45% | 17 | 223 |
| | | | | VARIANT A DNA, | | 63% | 11 | 124 |
| | | | | COMPLETE VIRION | | 79% | 9 | 110 |
| | | | | GENOM | | 76% | 9 | 122 |
| HNHNB29 | 895462 | 176 | WUblastx.64 | (Q9P195) PRO1722. | Q9P195 | 79% | 1543 | 1674 |
| | | | | | | 75% | 1398 | 1553 |
| HNHOD46 | 843488 | 177 | WUblastx.64 | (O60448) NEURONAL | O60448 | 76% | 334 | 552 |
| | | | | THREAD PROTEIN | | 56% | 646 | 921 |
| | | | | AD7C-NTP. | | 56% | 645 | 713 |
| | | | | | | 52% | 844 | 894 |
| | | | | | | 73% | 331 | 498 |
| | | | | | | 59% | 353 | 625 |
| | | | | | | 50% | 828 | 917 |
| | | | | | | 70% | 721 | 792 |
| | | | | | | 48% | 781 | 915 |
| | | | | | | 50% | 558 | 791 |
| | | | | | | 35% | 401 | 595 |
| | | | | | | 31% | 283 | 552 |
| | | | | | | 50% | 379 | 462 |
| | | | | | | 61% | 486 | 839 |
| HNTBI26 | 1310821 | 178 | WUblastx.64 | (Q96F65) Similar to | Q96F65 | 99% | 145 | 987 |
| | | | | RIKEN cDNA | | 29% | 1091 | 1201 |
| | | | | 0610031J06 gene | | 95% | 7 | 150 |
| | | | | (Fragment). | | | | |
| HNTBI26 | 796807 | 336 | WUblastx.64 | (Q96F65) Similar to | Q96F65 | 94% | 516 | 992 |
| | | | | RIKEN cDNA | | 97% | 149 | 544 |
| | | | | 0610031J06 gene | | 29% | 1096 | 1206 |
| | | | | (Fragment). | | 95% | 11 | 154 |
| HNTBI26 | 590738 | 337 | WUblastx.64 | (Q96F65) Similar to | Q96F65 | 70% | 824 | 973 |
| | | | | RIKEN cDNA | | 92% | 285 | 887 |
| | | | | 0610031J06 gene | | 84% | 133 | 378 |
| | | | | (Fragment). | | 29% | 1077 | 1187 |
| | | | | | | 97% | 1 | 138 |
| HNTBL27 | 545534 | 179 | WUblastx.64 | (Q96AA3) Putative | Q96AA3 | 98% | 243 | 500 |
| | | | | endoplasmic reticulum | | 33% | 13 | 168 |
| | | | | multispan transmembrane | | 40% | 646 | 711 |
| | | | | prote | | 96% | 13 | 261 |
| HNTCE26 | 1160395 | 180 | HMMER | PFAM: 7 transmembrane | PF00001 | 137.5 | 282 | 1037 |
| | | | 2.1.1 | receptor (rhodopsin | | | | |
| | | | | family) | | | | |
| | | | WUblastx.64 | (Q9H1Y3) DJ317G22.2 | Q9H1Y3 | 100% | 111 | 1316 |
| | | | | (ENCEPHALOPSIN) | | | | |
| | | | | (PANOPSIN). | | | | |
| HNTCE26 | 853373 | 338 | HMMER | PFAM: 7 transmembrane | PF00001 | 23.2 | 63 | 218 |
| | | | 2.1.1 | receptor (rhodopsin | | | | |
| | | | | family) | | | | |
| | | | WUblastx.64 | (Q9H1Y3) DJ317G22.2 | Q9H1Y3 | 95% | 370 | 495 |
| | | | | (ENCEPHALOSIN) | | 100% | 12 | 377 |
| | | | | (PANOPSIN). | | | | |
| HNTNC20 | 700627 | 181 | WUblastx.64 | (AAH24118) Similar to | AAH24118 | 57% | 252 | 776 |
| | | | | Unknown (protein for | | | | |
| | | | | IMAGE: 44 | | | | |
| HNTSY18 | 1041383 | 183 | WUblastx.64 | (Q9XSV8) SCO- | Q9XSV8 | 70% | 51 | 644 |
| | | | | SPONDIN | | 63% | 1204 | 1236 |
| | | | | (FRAGMENT). | | 37% | 54 | 596 |
| | | | | | | 31% | 66 | 803 |
| | | | | | | 29% | 824 | 931 |
| | | | | | | 28% | 42 | 596 |
| | | | | | | 30% | 66 | 863 |
| | | | | | | 36% | 48 | 662 |
| | | | | | | 30% | 416 | 922 |
| | | | | | | 29% | 635 | 1276 |
| | | | | | | 29% | 1078 | 1356 |
| | | | | | | 41% | 1482 | 1517 |
| | | | | | | 50% | 1101 | 1157 |
| | | | | | | 78% | 539 | 1201 |
| | | | | | | 26% | 530 | 892 |
| | | | | | | 36% | 228 | 584 |
| | | | | | | 26% | 755 | 1198 |
| | | | | | | 29% | 84 | 551 |
| | | | | | | 33% | 379 | 537 |
| | | | | | | 32% | 15 | 329 |
| | | | | | | 34% | 99 | 389 |
| | | | | | | 30% | 54 | 329 |
| | | | | | | 25% | 66 | 581 |
| | | | | | | 42% | 1485 | 1523 |
| | | | | | | 40% | 1017 | 1076 |
| HNTSY18 | 897950 | 340 | WUblastx.64 | (Q9GMX5) | Q9GMX5 | 61% | 356 | 201 |
| | | | | HYPOTHETICAL 12.9 KDA | | | | |
| | | | | PROTEIN. | | | | |
| HODDN92 | 422913 | 186 | WUblastx.64 | (Q9H1S5) BA110H4.2 | Q9H1S5 | 100% | 1119 | 1021 |
| | | | | (SIMILAR TO | | | | |
| | | | | MEMBRANE | | | | |
| | | | | PROTEIN). | | | | |
| HOFMQ33 | 1184465 | 188 | WUblastx.64 | (O15232) MATRILIN-3 | MTN3_HUMAN | 85% | 43 | 1500 |
| | | | | PRECURSOR. | | | | |
| HOFMQ33 | 919896 | 341 | HMMER | PFAM: von Willebrand | PF00092 | 189.8 | 288 | 815 |
| | | | 2.1.1 | factor type A domain | | | | |
| | | | WUblastx.64 | (O15232) MATRILIN-3 | MTN3_HUMAN | 85% | 42 | 1499 |
| | | | | PRECURSOR. | | | | |
| HOFMQ33 | 906694 | 342 | HMMER | PFAM: von Willebrand | PF00092 | 162.2 | 318 | 737 |
| | | | 2.1.1 | factor type A domain | | | | |
| | | | WUblastx.64 | (O15232) MATRILIN-3 | MTN3_HUMAN | 81% | 72 | 857 |
| | | | | PRECURSOR. | | | | |
| HOFMQ33 | 902639 | 343 | WUblastx.64 | (O15232) MATRILIN-3 | MTN3_HUMAN | 81% | 1584 | 877 |
| | | | | PRECURSOR. | | | | |
| HOFMQ33 | 702186 | 344 | WUblastx.64 | (Q8WUF2) Hypothetical | Q8WUF2 | 88% | 937 | 911 |
| | | | | 23.7 kDa protein. | | 99% | 914 | 327 |
| HOHBY44 | 873264 | 189 | WUblastx.64 | (O60565) GREMLIN | O60565 | 100% | 170 | 721 |
| | | | | (DRM). | | | | |
| HOQBJ82 | 1352356 | 190 | WUblastx.64 | (CAC37794) H-l(3)mbt- | CAC37794 | 100% | 324 | 2414 |
| | | | | like protein. | | | | |
| HOQBJ82 | 858338 | 347 | WUblastx.64 | (Q9BQI2) | Q9BQI2 | 56% | 406 | 585 |
| | | | | HYPOTHETICAL 69.3 KDA | | 96% | 41 | 496 |
| | | | | PROTEIN. | | | | |
| HOQBJ82 | 857453 | 348 | HMMER | PFAM: SET domain | PF00856 | 211.5 | 100 | 489 |
| | | | 2.1.1 | | | | | |
| | | | WUblastx.64 | (O96028) WHSC1 | O96028 | 98% | 61 | 1029 |
| | | | | PROTEIN. | | 49% | 2 | 166 |
| HOSDJ25 | 854234 | 192 | WUblastx.64 | (Q9D8Y9) | Q9D8Y9 | 85% | 468 | 593 |
| | | | | 1810018L05RIK | | 86% | 143 | 544 |
| | | | | PROTEIN. | | | | |
| HOUCQ17 | 429229 | 193 | HMMER | PFAM: Reprolysin family | PF01562 | 76.2 | −115 | −351 |
| | | | 2.1.1 | propeptide | | | | |
| | | | WUblastx.64 | (P97857) ADAM-TS 1 | ATS1_MOUSE | 81% | 508 | 3408 |
| | | | | PRECURSOR (EC | | | | |
| | | | | 3.4.24.—) (A | | | | |
| | | | | DISINTEGRIN A | | | | |
| HPEAD79 | 520202 | 194 | WUblastx.64 | (Q96NR6) CDNA | Q96NR6 | 48% | 498 | 806 |
| | | | | FLJ30278 fis, clone | | | | |
| | | | | BRACE2002755. | | | | |
| HPIBO15 | 1310868 | 195 | WUblastx.64 | (Q9CQS3) | Q9CQS3 | 93% | 128 | 757 |
| | | | | 1110018M03RIK | | | | |
| | | | | PROTEIN. | | | | |
| HPIBO15 | 590741 | 350 | WUblastx.64 | (Q9CQS3) | Q9CQS3 | 88% | 127 | 402 |
| | | | | 1110018M03RIK | | 95% | 507 | 722 |
| | | | | PROTEIN. | | 97% | 401 | 508 |
| HPJBI33 | 685699 | 196 | WUblastx.64 | (O60448) NEURONAL | O60448 | 49% | 617 | 934 |
| | | | | THREAD PROTEIN | | 33% | 633 | 890 |
| | | | | AD7C-NTP. | | 51% | 24 | 122 |
| | | | | | | 35% | 570 | 872 |
| | | | | | | 33% | 1317 | 1415 |
| | | | | | | 51% | 155 | 256 |
| | | | | | | 59% | 154 | 234 |
| | | | | | | 52% | 137 | 256 |
| | | | | | | 34% | 41 | 256 |
| | | | | | | 50% | 3 | 146 |
| | | | | | | 47% | 886 | 942 |
| HPJCL22 | 1146674 | 198 | WUblastx.64 | (Q9GKV3) | Q9GKV3 | 97% | 1420 | 2508 |
| | | | | HYPOTHETICAL 41.8 KDA | | 27% | 210 | 338 |
| | | | | PROTEIN. | | 75% | 2701 | 2823 |
| HPJCL22 | 1034817 | 354 | WUblastx.64 | (Q9VWN8) CG7307 | Q9VWN8 | 69% | 64 | 348 |
| | | | | PROTEIN. | | 61% | 468 | 992 |
| HPJCL22 | 1046434 | 355 | WUblastx.64 | (Q9H8F3) CDNA | Q9H8F3 | 94% | 346 | 582 |
| | | | | FLJ13680 FIS, CLONE | | 81% | 16 | 162 |
| | | | | PLACE2000007, | | | | |
| | | | | HIGHLY SIMILAR TO | | | | |
| | | | | HOM | | | | |
| HPMDK28 | 846357 | 199 | WUblastx.64 | (Q9NP77) CDNA | Q9NP77 | 100% | 163 | 666 |
| | | | | FLJ10947 FIS, CLONE | | | | |
| | | | | PLACE1000066, | | | | |
| | | | | WEAKLY SIMILAR TO | | | | |
| | | | | SSU | | | | |
| HPMDK28 | 639118 | 356 | WUblastx.64 | (Q9NP77) CDNA | Q9NP77 | 100% | 157 | 660 |
| | | | | FLJ10947 FIS, CLONE | | | | |
| | | | | PLACE1000066, | | | | |
| | | | | WEAKLY SIMILAR TO | | | | |
| | | | | SSU | | | | |
| HPRAL78 | 1352342 | 200 | WUblastx.64 | hypothetical protein | pir\|T08724\|T08724 | 99% | 62 | 1312 |
| | | | | DKFZp566D213.1 - | | | | |
| | | | | human | | | | |
| HPRAL78 | 844216 | 357 | WUblastx.64 | (AAH08720) Unknown | AAH08720 | 83% | 70 | 1017 |
| | | | | (protein for MGC: 8447). | | 51% | 490 | 1068 |
| HPRAL78 | 484735 | 358 | WUblastx.64 | (Q91XD7) Unknown | Q91XD7 | 95% | 124 | 336 |
| | | | | (protein for MGC: 18896). | | | | |
| HRABA80 | 882176 | 201 | WUblastx.64 | (Q9HA75) CDNA | Q9HA75 | 63% | 647 | 679 |
| | | | | FLJ12122 FIS, CLONE | | 48% | 144 | 371 |
| | | | | MAMMA1000129. | | 93% | 247 | 507 |
| HRABA80 | 588460 | 359 | WUblastx.64 | (Q9HA75) CDNA | Q9HA75 | 63% | 633 | 665 |
| | | | | FLJ12122 FIS, CLONE | | 48% | 130 | 357 |
| | | | | MAMMA1000129. | | 92% | 233 | 493 |
| HRACD15 | 871221 | 202 | WUblastx.64 | (AAH08084) | AAH08084 | 98% | 1452 | 253 |
| | | | | Hypothetical 50.4 kDa | | | | |
| | | | | protein. | | | | |
| HRACD15 | 706332 | 360 | WUblastx.64 | (AAH08084) | AAH08084 | 82% | 1649 | 1581 |
| | | | | Hypothetical 50.4 kDa | | 98% | 1596 | 253 |
| | | | | protein. | | | | |
| HRACJ35 | 877666 | 203 | WUblastx.64 | (Q9Y5X6) BLOOD | Q9Y5X6 | 98% | 1468 | 1755 |
| | | | | PLASMA GLUTAMATE | | 99% | 132 | 1472 |
| | | | | CARBOXYPEPTIDASE | | | | |
| | | | | PRECURSOR (EC 3.4.17 | | | | |
| HRACJ35 | 730504 | 361 | WUblastx.64 | (Q9Y5X6) BLOOD | Q9Y5X6 | 98% | 1435 | 1722 |
| | | | | PLASMA GLUTAMATE | | 99% | 99 | 1439 |
| | | | | CARBOXYPEPTIDASE | | | | |
| | | | | PRECURSOR (EC 3.4.17 | | | | |
| HRACJ35 | 470546 | 362 | WUblastx.64 | (Q9Y646) | Q9Y646 | 96% | 507 | 785 |
| | | | | AMINOPEPTIDASE. | | 100% | 1 | 519 |
| HRGBL78 | 910133 | 204 | HMMER | PFAM: Immunoglobulin | PF00047 | 32 | 582 | 755 |
| | | | 2.1.1 | domain | | | | |
| | | | WUblastx.64 | (Q8WXH3) FREB. | Q8WXH3 | 87% | 9 | 1085 |
| HRGBL78 | 904040 | 363 | WUblastx.64 | (Q8WXH3) FREB. | Q8WXH3 | 94% | 15 | 596 |
| | | | | | | 100% | 547 | 588 |
| | | | | | | 100% | 587 | 625 |
| HRGBL78 | 904621 | 364 | WUblastx.64 | (Q9EPP8) VIRION- | Q9EPP8 | 96% | 118 | 35 |
| | | | | ASSOCIATED | | | | |
| | | | | NUCLEAR-SHUTTLING | | | | |
| | | | | PROTEIN | | | | |
| | | | | (FRAGMENT). | | | | |
| HRGBL78 | 863802 | 365 | WUblastx.64 | (Q8WXH3) FREB. | Q8WXH3 | 95% | 489 | 698 |
| | | | | | | 29% | 3 | 341 |
| | | | | | | 98% | 59 | 496 |
| HROAJ39 | 1181699 | 205 | WUblastx.64 | (Q96ES0) Unknown | Q96ES0 | 96% | 7 | 1146 |
| | | | | (protein for MGC: 16944). | | | | |
| HROAJ39 | 1114849 | 366 | WUblastx.64 | (Q96ES0) Unknown | Q96ES0 | 99% | 10 | 762 |
| | | | | (protein for MGC: 16944). | | | | |
| HROAJ39 | 1027712 | 367 | WUblastx.64 | (Q96ES0) Unknown | Q96ES0 | 95% | 7 | 1056 |
| | | | | (protein for MGC: 16944). | | | | |
| HROBD68 | 827306 | 206 | WUblastx.64 | (Q9H728) CDNA: | Q9H728 | 66% | 418 | 576 |
| | | | | FLJ21463 FIS, CLONE | | 78% | 581 | 748 |
| | | | | COL04765. | | | | |
| HSAWD74 | 460527 | 207 | WUblastx.64 | (Q9NX85) CDNA | Q9NX85 | 67% | 967 | 674 |
| | | | | FLJ20378 FIS, CLONE | | | | |
| | | | | KAIA0536. | | | | |
| HSDEK49 | 1352253 | 208 | WUblastx.64 | (Q9Y279) Z39IG | Q9Y279 | 100% | 60 | 1256 |
| | | | | PROTEIN PRECURSOR. | | | | |
| HSDEK49 | 625998 | 369 | HMMER | PFAM: Immunoglobulin | PF00047 | 18.7 | 225 | 470 |
| | | | 2.1.1 | domain | | | | |
| | | | WUblastx.64 | (Q9Y279) Z39IG | Q9Y279 | 88% | 444 | 1040 |
| | | | | PROTEIN PRECURSOR. | | 99% | 126 | 542 |
| HSDFJ26 | 834619 | 209 | WUblastx.64 | (Q9BYJ0) KSP37. | Q9BYJ0 | 99% | 99 | 767 |
| HSDFJ26 | 836071 | 370 | WUblastx.64 | (Q9BYJ0) KSP37. | Q9BYJ0 | 100% | 99 | 281 |
| | | | | | | 92% | 238 | 768 |
| HSDJA15 | 795252 | 210 | WUblastx.64 | (Q9BZW5) | Q9BZW5 | 99% | 4 | 702 |
| | | | | TRANSMEMBRANE 6 | | | | |
| | | | | SUPERFAMILY | | | | |
| | | | | MEMBER 1. | | | | |
| HSHAX21 | 612823 | 213 | WUblastx.64 | (Q9NV22) CDNA | Q9NV22 | 99% | 5 | 598 |
| | | | | FLJ10983 FIS, CLONE | | | | |
| | | | | PLACE1001781, | | | | |
| | | | | WEAKLY SIMILAR TO | | | | |
| | | | | PRO | | | | |
| HSIDJ81 | 589447 | 214 | WUblastx.64 | (Q9H728) CDNA: | Q9H728 | 74% | 1289 | 996 |
| | | | | FLJ21463 FIS, CLONE | | | | |
| | | | | COL04765. | | | | |
| HSJBQ79 | 1304677 | 215 | WUblastx.64 | (Q96D15) Hypothetical | Q96D15 | 96% | 38 | 586 |
| | | | | 37.5 kDa protein. | | | | |
| HSJBQ79 | 661698 | 372 | HMMER | PFAM: EF hand | PF00036 | 23.4 | 663 | 734 |
| | | | 2.1.1 | | | | | |
| | | | WUblastx.64 | (Q96D15) Hypothetical | Q96D15 | 99% | 54 | 1037 |
| | | | | 37.5 kDa protein. | | | | |
| HSJBQ79 | 371784 | 373 | WUblastx.64 | (Q96D15) Hypothetical | Q96D15 | 97% | 32 | 586 |
| | | | | 37.5 kDa protein. | | | | |
| HSKDA27 | 1352409 | 216 | WUblastx.64 | (BAB85613) URB. | BAB85613 | 83% | 786 | 3635 |
| HSKDA27 | 1074734 | 374 | WUblastx.64 | (BAB85613) URB. | BAB85613 | 60% | 1601 | 1789 |
| | | | | | | 60% | 1715 | 1789 |
| | | | | | | 52% | 1718 | 1792 |
| | | | | | | 73% | 127 | 1791 |
| | | | | | | 32% | 1716 | 1790 |
| HSKDA27 | 872570 | 375 | WUblastx.64 | (BAB85613) URB. | BAB85613 | 69% | 9 | 1670 |
| | | | | | | 32% | 1597 | 1671 |
| HSKGN81 | 676075 | 217 | WUblastx.64 | (Q9CZY7) | Q9CZY7 | 68% | 146 | 1126 |
| | | | | 2610307O08RIK | | | | |
| | | | | PROTEIN. | | | | |
| HSKGN81 | 409905 | 376 | WUblastx.64 | (Q9CZY7) | Q9CZY7 | 66% | 436 | 1311 |
| | | | | 2610307O08RIK | | | | |
| | | | | PROTEIN. | | | | |
| HSNAD72 | 467397 | 219 | WUblastx.64 | (Q9P195) PRO1722. | Q9P195 | 62% | 825 | 730 |
| | | | | | | 53% | 623 | 579 |
| | | | | | | 59% | 730 | 536 |
| HSUBW09 | 413246 | 223 | WUblastx.64 | (Q95LL0) Hypothetical | Q95LL0 | 73% | 589 | 633 |
| | | | | 11.3 kDa protein. | | 77% | 327 | 611 |
| HSVBU91 | 596868 | 224 | WUblastx.64 | cytoplasmic linker protein | pir\|T42734\|T42734 | 85% | 356 | 171 |
| | | | | CLIP-115 - rat | | | | |
| HSXGI47 | 886200 | 225 | WUblastx.64 | (Q9H728) CDNA: | Q9H728 | 56% | 585 | 860 |
| | | | | FLJ21463 FIS, CLONE | | 55% | 762 | 965 |
| | | | | COL04765. | | | | |
| HSYAZ63 | 1177537 | 226 | WUblastx.64 | (Q9Y613) FH1/FH2 | FHOS_HUMAN | 98% | 889 | 1713 |
| | | | | DOMAINS- | | 55% | 272 | 544 |
| | | | | CONTAINING | | 81% | 2101 | 2514 |
| | | | | PROTEIN (FORMIN | | 100% | 478 | 750 |
| | | | | HOMOLOG | | 92% | 3007 | 3090 |
| | | | | | | 28% | 289 | 654 |
| | | | | | | 42% | 608 | 670 |
| | | | | | | 28% | 1015 | 1458 |
| | | | | | | 33% | 2030 | 2119 |
| | | | | | | 56% | 2005 | 2052 |
| | | | | | | 73% | 2573 | 2941 |
| HSYAZ63 | 862063 | 378 | WUblastx.64 | (Q9Y613) FH1/FH2 | FHOS_HUMAN | 69% | 458 | 871 |
| | | | | DOMAINS- | | 92% | 1364 | 1447 |
| | | | | CONTAINING | | 73% | 930 | 1298 |
| | | | | PROTEIN (FORMIN | | 52% | 362 | 418 |
| | | | | HOMOLOG | | 33% | 387 | 476 |
| | | | | | | 100% | 14 | 70 |
| HSYBG37 | 1056317 | 227 | WUblastx.64 | hypothetical protein | pir\|T45062\|T45062 | 100% | 47 | 961 |
| | | | | c316G12.3 [imported] - | | | | |
| | | | | human | | | | |
| HSYBG37 | 581098 | 379 | WUblastx.64 | hypothetical protein | pir\|T45062\|T45062 | 100% | 48 | 962 |
| | | | | c316G12.3 [imported] - | | | | |
| | | | | human | | | | |
| HTADW91 | 844835 | 228 | WUblastx.64 | (Q8WV10) Hypothetical | Q8WV10 | 86% | 155 | 1117 |
| | | | | 38.4 kDa protein. | | | | |
| HTAEE28 | 1018291 | 229 | WUblastx.64 | (Q9D4I2) | Q9D4I2 | 78% | 319 | 1161 |
| | | | | 4932408F18RIK | | | | |
| | | | | PROTEIN. | | | | |
| HTAEE28 | 882919 | 380 | WUblastx.64 | (Q9D4I2) | Q9D4I2 | 78% | 372 | 617 |
| | | | | 4932408F18RIK | | | | |
| | | | | PROTEIN. | | | | |
| HTAEE28 | 864120 | 381 | WUblastx.64 | (Q9D4I2) | Q9D4I2 | 76% | 142 | 768 |
| | | | | 4932408F18RIK | | | | |
| | | | | PROTEIN. | | | | |
| HTDAF28 | 396835 | 230 | WUblastx.64 | (Q9BX79) STRA6 | Q9BX79 | 98% | 17 | 298 |
| | | | | ISOFORM 1. | | | | |
| HTEEB42 | 206980 | 232 | HMMER | PFAM: Immunoglobulin | PF00047 | 48.5 | 500 | 706 |
| | | | 2.1.1 | domain | | | | |
| | | | WUblastx.64 | (AAG49022) Junctional | AAG49022 | 99% | 59 | 952 |
| | | | | adhesion molecule 2. | | | | |
| HTEJN13 | 1352272 | 235 | WUblastx.64 | (Q9BWY1) BA552M11.5 | Q9BWY1 | 100% | 158 | 193 |
| | | | | (NOVEL PROTEIN) | | 100% | 351 | 779 |
| | | | | (FRAGMENT). | | | | |
| HTEJN13 | 658744 | 384 | WUblastx.64 | (Q9DAR9) | Q9DAR9 | 60% | 525 | 743 |
| | | | | 1700001D09RIK | | 77% | 163 | 516 |
| | | | | PROTEIN. | | | | |
| HTEJN13 | 381941 | 385 | WUblastx.64 | (Q9HBK8) AD026. | Q9HBK8 | 92% | 191 | 229 |
| | | | | | | 94% | 214 | 633 |
| HTELP17 | 836072 | 236 | WUblastx.64 | (AAH24188) Similar to | AAH24188 | 100% | 22 | 465 |
| | | | | RIKEN cDNA | | | | |
| | | | | 4930453N24 gene. | | | | |
| HTELS08 | 847090 | 237 | WUblastx.64 | (Q9JI83) EPCS26 | Q9JI83 | 34% | 33 | 395 |
| | | | | (PLAC1) (PLACENTAL | | | | |
| | | | | SPECIFIC PROTEIN 1). | | | | |
| HTLEP53 | 634852 | 238 | WUblastx.64 | (Q8WTZ3) Hypothetical | Q8WTZ3 | 66% | 543 | 499 |
| | | | | 27.2 kDa protein. | | 68% | 806 | 534 |
| HTPCS72 | 854941 | 240 | WUblastx.64 | (O95880) UNKNOWN. | O95880 | 100% | 2191 | 2577 |
| HTPCS72 | 566683 | 386 | WUblastx.64 | (O95880) UNKNOWN. | O95880 | 100% | 356 | 742 |
| HTPIH83 | 919916 | 241 | HMMER | PFAM: PMP- | PF00822 | 81.5 | 127 | 660 |
| | | | 2.1.1 | 22/EMP/MP20/Claudin | | | | |
| | | | | family | | | | |
| | | | WUblastx.64 | (P57739) CLAUDIN-2. | CLD2_HUMAN | 100% | 118 | 807 |
| HTPIH83 | 895024 | 387 | HMMER | PFAM: PMP- | PF00822 | 55.9 | 120 | 500 |
| | | | 2.1.1 | 22/EMP/MP20/Claudin | | | | |
| | | | | family | | | | |
| | | | WUblastx.64 | (P57739) CLAUDIN-2. | CLD2_HUMAN | 98% | 111 | 530 |
| HTPIH83 | 898088 | 388 | WUblastx.64 | (P57739) CLAUDIN-2. | CLD2_HUMAN | 96% | 96 | 353 |
| HTTBS64 | 1008159 | 244 | WUblastx.64 | (O00172) LINE-1 | O00172 | 50% | 932 | 714 |
| | | | | REVERSE | | | | |
| | | | | TRANSCRIPTASE | | | | |
| | | | | (FRAGMENT). | | | | |
| HTXAJ12 | 1310814 | 246 | WUblastx.64 | (Q9D7W4) | Q9D7W4 | 45% | 12 | 77 |
| | | | | 2210021G21RIK | | 57% | 97 | 273 |
| | | | | PROTEIN. | | | | |
| HTXAJ12 | 567434 | 391 | WUblastx.64 | (AAH24685) Similar to | AAH24685 | 100% | 9 | 95 |
| | | | | transmembrane 4 | | 98% | 97 | 267 |
| | | | | superfamily m | | | | |
| HTXJM03 | 603918 | 247 | WUblastx.64 | (Q9BRH0) SIMILAR TO | Q9BRH0 | 100% | 470 | 565 |
| | | | | DKFZP727C091 | | 99% | 564 | 1760 |
| | | | | PROTEIN. | | | | |
| HTXKF95 | 891275 | 248 | WUblastx.64 | (AAH08360) Similar to | AAH08360 | 84% | 324 | 644 |
| | | | | hypothetical protein | | 92% | 81 | 203 |
| | | | | FLJ22376 | | | | |
| HTXKF95 | 834438 | 392 | WUblastx.64 | (AAH08360) Similar to | AAH08360 | 100% | 2 | 553 |
| | | | | hypothetical protein | | | | |
| | | | | FLJ22376 | | | | |
| HTXON32 | 838288 | 249 | WUblastx.64 | (Q96NR6) CDNA | Q96NR6 | 58% | 1397 | 1498 |
| | | | | FLJ30278 fis, clone | | 64% | 1194 | 1397 |
| | | | | BRACE2002755. | | | | |
| HWAAD63 | 838626 | 252 | HMMER | PFAM: Sodium/calcium | PF01699 | 62.8 | 346 | 453 |
| | | | 2.1.1 | exchanger protein | | | | |
| | | | WUblastx.64 | (Q9HC58) | Q9HC58 | 65% | 229 | 813 |
| | | | | SODIUM/CALCIUM | | | | |
| | | | | EXCHANGER NCKX3. | | | | |
| HWAAD63 | 833089 | 393 | HMMER | PFAM: Sodium/calcium | PF01699 | 37.8 | 346 | 453 |
| | | | 2.1.1 | exchanger protein | | | | |
| | | | WUblastx.64 | (Q9HC58) | Q9HC58 | 78% | 229 | 453 |
| | | | | SODIUM/CALCIUM | | 55% | 429 | 596 |
| | | | | EXCHANGER NCKX3. | | 72% | 533 | 814 |
| HWAAD63 | 793875 | 394 | HMMER | PFAM: Sodium/calcium | PF01699 | 113.7 | 336 | 773 |
| | | | 2.1.1 | exchanger protein | | | | |
| | | | WUblastx.64 | (Q9HC58) | Q9HC58 | 76% | 219 | 806 |
| | | | | SODIUM/CALCIUM | | | | |
| | | | | EXCHANGER NCKX3. | | | | |
| HWBCP79 | 846382 | 254 | WUblastx.64 | (Q96MM0) CDNA | Q96MM0 | 27% | 340 | 143 |
| | | | | FLJ32172 fis, clone | | 85% | 158 | 78 |
| | | | | PLACE6000555. | | | | |
| HWBCP79 | 646977 | 395 | WUblastx.64 | (Q96MM0) CDNA | Q96MM0 | 27% | 330 | 133 |
| | | | | FLJ32172 fis, clone | | 85% | 148 | 68 |
| | | | | PLACE6000555. | | | | |
| HWBEM18 | 949402 | 255 | WUblastx.64 | nuclear pore protein | pir\|S04921\|S04921 | 84% | 102 | 5735 |
| | | | | gp210 precursor - rat | | | | |
| HWBEM18 | 906580 | 396 | WUblastx.64 | nuclear pore protein | pir\|S04921\|S04921 | 87% | 92 | 2629 |
| | | | | gp210 precursor - rat | | 30% | 2595 | 2732 |
| | | | | | | 79% | 2626 | 3570 |
| HWBEM18 | 877573 | 397 | WUblastx.64 | (BAB84927) FLJ00172 | BAB84927 | 99% | 37 | 1494 |
| | | | | protein (Fragment). | | | | |
| HWBFX31 | 799427 | 256 | WUblastx.64 | (Q9N083) UNNAMED | Q9N083 | 56% | 1663 | 1517 |
| | | | | PORTEIN PRODUCT. | | | | |
| HWHGZ51 | 886212 | 257 | WUblastx.64 | (Q9UJ74) | Q9UJ74 | 100% | 33 | 1070 |
| | | | | HYPOTHETICAL 36.0 KDA | | | | |
| | | | | PROTEIN (C4.4A | | | | |
| | | | | PROTEIN). | | | | |
| HAGAI85 | 381942 | 259 | WUblastx.64 | (O15432) PROBABLE | COP2_HUMAN | 100% | 91 | 234 |
| | | | | LOW-AFFINITY | | 96% | 228 | 518 |
| | | | | COPPER UPTAKE | | | | |
| | | | | PROTEIN 2 (HCT | | | | |
| HOFOC33 | 1186156 | 260 | WUblastx.64 | clusterin precursor - dog | pir\|A40018\|A40018 | 69% | 1022 | 1414 |
| | | | | | | 81% | 115 | 1086 |
| HOFOC33 | 967554 | 398 | HMMER | PFAM: Clusterin | PF01093 | 236.4 | 81 | 395 |
| | | | 2.1.1 | | | | | |
| | | | WUblastx.64 | clusterin precursor - dog | pir\|A40018\|A40018 | 44% | 373 | 453 |
| | | | | | | 91% | 81 | 395 |
| HOFOC33 | 878690 | 399 | HMMER | PFAM: Clusterin | PF01093 | 236.6 | 81 | 395 |
| | | | 2.1.1 | | | | | |
| | | | WUblastx.64 | clusterin precursor - dog | pir\|A40018\|A40018 | 44% | 373 | 453 |
| | | | | | | 91% | 81 | 395 |
| HOFOC33 | 905734 | 400 | HMMER | PFAM: Clusterin | PF01093 | 301.2 | 76 | 432 |
| | | | 2.1.1 | | | | | |
| | | | WUblastx.64 | clusterin precursor - dog | pir\|A40018\|A40018 | 77% | 1023 | 1415 |
| | | | | | | 95% | 76 | 432 |
| | | | | | | 86% | 440 | 1087 |
| HOFOC33 | 902326 | 401 | WUblastx.64 | clusterin precursor - dog | pir\|A40018\|A40018 | 84% | 583 | 257 |
| HOFOC33 | 885140 | 402 | WUblastx.64 | clusterin precursor - dog | pir\|A40018\|A40018 | 77% | 839 | 36 |
| HOFOC33 | 806819 | 403 | HMMER | PFAM: 60s Acidic | PF00428 | 74.6 | −422 | −733 |
| | | | 2.1.1 | ribosomal protein | | | | |
| | | | WUblastx.64 | acidic ribosomal protein | pir\|A27125\|R5HUP0 | 52% | 5 | 55 |
| | | | | P0, cytosolic [validated] - | | 87% | 42 | 812 |
| | | | | human | | | | |
| HSDEZ20 | 1352287 | 261 | WUblastx.64 | probable voltage-activated | pir\|T17101\|T17101 | 98% | 4 | 336 |
| | | | | cation channel - rat | | | | |
| HSDEZ20 | 704101 | 404 | WUblastx.64 | probable voltage-activated | pir\|T17101\|T17101 | 89% | 9 | 335 |
| | | | | cation channel - rat | | | | |

RACE Protocol for Recovery of Full-Length Genes

[0134] Partial cDNA clones can be made full-length by utilizing the rapid amplification of cDNA ends (RACE) procedure described in Frohman, M. A., et al., Proc. Nat'l. Acad. Sci. USA, 85:8998-9002 (1988). A cDNA clone missing either the 5′ or 3′ end can be reconstructed to include the absent base pairs extending to the translational start or stop codon, respectively. In some cases, cDNAs are missing the start codon of translation, therefor. The following briefly describes a modification of this original 5′ RACE procedure. Poly A+ or total RNA is reverse transcribed with Superscript II (Gibco/BRL) and an antisense or complementary primer specific to the cDNA sequence. The primer is removed from the reaction with a Microcon Concentrator (Amicon). The first-strand cDNA is then tailed with dATP and terminal deoxynucleotide transferase (Gibco/BRL). Thus, an anchor sequence is produced which is needed for PCR amplification. The second strand is synthesized from the dA-tail in PCR buffer, Taq DNA polymerase (Perkin-Elmer Cetus), an oligo-dT primer containing three adjacent restriction sites (XhoI, SalI and ClaI) at the 5′ end and a primer containing just these restriction sites. This double-stranded cDNA is PCR amplified for 40 cycles with the same primers as well as a nested cDNA-specific antisense primer. The PCR products are size-separated on an ethidium bromide-agarose gel and the region of gel containing cDNA products the predicted size of missing protein-coding DNA is removed. cDNA is purified from the agarose with the Magic PCR Prep kit (Promega), restriction digested with XhoI or SalI, and ligated to a plasmid such as pBluescript SKH (Stratagene) at XhoI and EcoRV sites. This DNA is transformed into bacteria and the plasmid clones sequenced to identify the correct protein-coding inserts. Correct 5′ ends are confirmed by comparing this sequence with the putatively identified homologue and overlap with the partial cDNA clone. Similar methods known in the art and/or commercial kits are used to amplify and recover 3′ ends.

[0135] Several quality-controlled kits are commercially available for purchase. Similar reagents and methods to those above are supplied in kit form from Gibco/BRL for both 5′ and 3′ RACE for recovery of full length genes. A second kit is available from Clontech which is a modification of a related technique, SLIC (single-stranded ligation to single-stranded cDNA), developed by Dumas et al., Nucleic Acids Res., 19:5227-32 (1991). The major differences in procedure are that the RNA is alkaline hydrolyzed after reverse transcription and RNA ligase is used to join a restriction site-containing anchor primer to the first-strand cDNA. This obviates the necessity for the dA-tailing reaction which results in a polyT stretch that is difficult to sequence past.

[0136] An alternative to generating 5′ or 3′ cDNA from RNA is to use cDNA library double-stranded DNA. An asymmetric PCR-amplified antisense cDNA strand is synthesized with an antisense cDNA-specific primer and a plasmid-anchored primer. These primers are removed and a symmetric PCR reaction is performed with a nested cDNA-specific antisense primer and the plasmid-anchored primer.

[0137] RNA Ligase Protocol for Generating the 5′ or 3′ End Sequences to Obtain Full Length Genes

[0138] Once a gene of interest is identified, several methods are available for the identification of the 5′ or 3′ portions of the gene which may not be present in the original cDNA plasmid. These methods include, but are not limited to, filter probing, clone enrichment using specific probes and protocols similar and identical to 5′ and 3′ RACE. While the full length gene may be present in the library and can be identified by probing, a useful method for generating the 5′ or 3′ end is to use the existing sequence information from the original cDNA to generate the missing information. A method similar to 5′ RACE is available for generating the missing 5′ end of a desired full-length gene. (This method was published by Fromont-Racine et al., Nucleic Acids Res., 21(7):1683-1684 (1993)). Briefly, a specific RNA oligonucleotide is ligated to the 5′ ends of a population of RNA presumably containing full-length gene RNA transcript and a primer set containing a primer specific to the ligated RNA oligonucleotide and a primer specific to a known sequence of the gene of interest, is used to PCR amplify the 5′ portion of the desired full length gene which may then be sequenced and used to generate the full length gene. This method starts with total RNA isolated from the desired source, poly A RNA may be used but is not a prerequisite for this procedure. The RNA preparation may then be treated with phosphatase if necessary to eliminate 5′ phosphate groups on degraded or damaged RNA which may interfere with the later RNA ligase step. The phosphatase if used is then inactivated and the RNA is treated with tobacco acid pyrophosphatase in order to remove the cap structure present at the 5′ ends of messenger RNAs. This reaction leaves a 5′ phosphate group at the 5′ end of the cap cleaved RNA which can then be ligated to an RNA oligonucleotide using T4 RNA ligase. This modified RNA preparation can then be used as a template for first strand cDNA synthesis using a gene specific oligonucleotide. The first strand synthesis reaction can then be used as a template for PCR amplification of the desired 5′ end using a primer specific to the ligated RNA oligonucleotide and a primer specific to the known sequence of the gene of interest. The resultant product is then sequenced and analyzed to confirm that the 5′ end sequence belongs to the relevant gene.

[0139] The present invention also relates to vectors or plasmids which include such DNA sequences, as well as the use of the DNA sequences. The material deposited with the ATCC (e.g., as described in columns 2 and 3 of Table 1A, and/or as set forth in Table 1B, Table 6, or Table 7) is a mixture of cDNA clones derived from a variety of human tissue and cloned in either a plasmid vector or a phage vector, as described, for example, in Table 1A and Table 7. These deposits are referred to as “the deposits” herein. The tissues from which some of the clones were derived are listed in Table 7, and the vector in which the corresponding cDNA is contained is also indicated in Table 7. The deposited material includes cDNA clones corresponding to SEQ ID NO:X described, for example, in Table 1A and/or Table 1B (ATCC Deposit No:Z). A clone which is isolatable from the ATCC Deposits by use of a sequence listed as SEQ ID NO:X, may include the entire coding region of a human gene or in other cases such clone may include a substantial portion of the coding region of a human gene. Furthermore, although the sequence listing may in some instances list only a portion of the DNA sequence in a clone included in the ATCC Deposits, it is well within the ability of one skilled in the art to sequence the DNA included in a clone contained in the ATCC Deposits by use of a sequence (or portion thereof) described in, for example Tables 1A and/or Table 1B or Table 2, by procedures hereinafter further described, and others apparent to those skilled in the art.

[0140] Also provided in Table 1A and Table 7 is the name of the vector which contains the cDNA clone. Each vector is routinely used in the art. The following additional information is provided for convenience.

[0141] Vectors Lambda Zap (U.S. Pat. Nos. 5,128,256 and 5,286,636), Uni-Zap XR (U.S. Pat. Nos. 5,128,256 and 5,286,636), Zap Express (U.S. Pat. Nos. 5,128,256 and 5,286,636), pBluescript (pBS) (Short, J. M. et al., Nucleic Acids Res. 16:7583-7600 (1988); Alting-Mees, M. A. and Short, J. M., Nucleic Acids Res. 17:9494 (1989)) and pBK (Alting-Mees, M. A. et al., Strategies 5:58-61 (1992)) are commercially available from Stratagene Cloning Systems, Inc., 11011 N. Torrey Pines Road, La Jolla, Calif., 92037. pBS contains an ampicillin resistance gene and pBK contains a neomycin resistance gene. Phagemid pBS may be excised from the Lambda Zap and Uni-Zap XR vectors, and phagemid pBK may be excised from the Zap Express vector. Both phagemids may be transformed into E. coli strain XL-1 Blue, also available from Stratagene.

[0142] Vectors pSport1, pCMVSport 1.0, pCMVSport 2.0 and pCMVSport 3.0, were obtained from Life Technologies, Inc., P.O. Box 6009, Gaithersburg, Md. 20897. All Sport vectors contain an ampicillin resistance gene and may be transformed into E. coli strain DH10B, also available from Life Technologies. See, for instance, Gruber, C. E., et al., Focus 15:59-(1993). Vector lafmid BA (Bento Soares, Columbia University, New York, N.Y.) contains an ampicillin resistance gene and can be transformed into E. coli strain XL-1 Blue. Vector pCR®2.1, which is available from Invitrogen, 1600 Faraday Avenue, Carlsbad, Calif. 92008, contains an ampicillin resistance gene and may be transformed into E. coli strain DH10B, available from Life Technologies. See, for instance, Clark, J. M., Nuc. Acids Res. 16:9677-9686 (1988) and Mead, D. et al., Bio/Technology 9: (1991).

[0143] The present invention also relates to the genes corresponding to SEQ ID NO:X, SEQ ID NO:Y, and/or the deposited clone (ATCC Deposit No:Z). The corresponding gene can be isolated in accordance with known methods using the sequence information disclosed herein. Such methods include preparing probes or primers from the disclosed sequence and identifying or amplifying the corresponding gene from appropriate sources of genomic material

[0144] Also provided in the present invention are allelic variants, orthologs, and/or species homologs. Procedures known in the art can be used to obtain full-length genes, allelic variants, splice variants, full-length coding portions, orthologs, and/or species homologs of genes corresponding to SEQ ID NO:X or the complement thereof, polypeptides encoded by genes corresponding to SEQ ID NO:X or the complement thereof, and/or the cDNA contained in ATCC Deposit No:Z, using information from the sequences disclosed herein or the clones deposited with the ATCC. For example, allelic variants and/or species homologs may be isolated and identified by making suitable probes or primers from the sequences provided herein and screening a suitable nucleic acid source for allelic variants and/or the desired homologue.

[0145] The polypeptides of the invention can be prepared in any suitable manner. Such polypeptides include isolated naturally occurring polypeptides, recombinantly produced polypeptides, synthetically produced polypeptides, or polypeptides produced by a combination of these methods. Means for preparing such polypeptides are well understood in the art.

[0146] The polypeptides may be in the form of the secreted protein, including the mature form, or may be a part of a larger protein, such as a fusion protein (see below). It is often advantageous to include an additional amino acid sequence which contains secretory or leader sequences, pro-sequences, sequences which aid in purification, such as multiple histidine residues, or an additional sequence for stability during recombinant production.

[0147] The polypeptides of the present invention are preferably provided in an isolated form, and preferably are substantially purified. A recombinantly produced version of a polypeptide, including the secreted polypeptide, can be substantially purified using techniques described herein or otherwise known in the art, such as, for example, by the one-step method described in Smith and Johnson, Gene 67:31-40 (1988). Polypeptides of the invention also can be purified from natural, synthetic or recombinant sources using techniques described herein or otherwise known in the art, such as, for example, antibodies of the invention raised against the polypeptides of the present invention in methods which are well known in the art.

[0148] The present invention provides a polynucleotide comprising, or alternatively consisting of, the nucleic acid sequence of SEQ ID NO:X, and/or the cDNA sequence contained in ATCC Deposit No:Z. The present invention also provides a polypeptide comprising, or alternatively, consisting of, the polypeptide sequence of SEQ ID NO:Y, a polypeptide encoded by SEQ ID NO:X or a complement thereof, a polypeptide encoded by the cDNA contained in ATCC Deposit No:Z, and/or the polypeptide sequence encoded by a nucleotide sequence in SEQ ID NO:B as defined in column 6 of Table 1C. Polynucleotides encoding a polypeptide comprising, or alternatively consisting of the polypeptide sequence of SEQ ID NO:Y, a polypeptide encoded by SEQ ID NO:X, a polypeptide encoded by the cDNA contained in ATCC Deposit No:Z, and/or a polypeptide sequence encoded by a nucleotide sequence in SEQ ID NO:B as defined in column 6 of Table 1C are also encompassed by the invention. The present invention further encompasses a polynucleotide comprising, or alternatively consisting of, the complement of the nucleic acid sequence of SEQ ID NO:X, a nucleic acid sequence encoding a polypeptide encoded by the complement of the nucleic acid sequence of SEQ ID NO:X, and/or the cDNA contained in ATCC Deposit No:Z.

[0149] Moreover, representative examples of polynucleotides of the invention comprise, or alternatively consist of, one, two, three, four, five, six, seven, eight, nine, ten, or more of the sequences delineated in Table 1C column 6, or any combination thereof. Additional, representative examples of polynucleotides of the invention comprise, or alternatively consist of, one, two, three, four, five, six, seven, eight, nine, ten, or more of the complementary strand(s) of the sequences delineated in Table 1C column 6, or any combination thereof. In further embodiments, the above-described polynucleotides of the invention comprise, or alternatively consist of, sequences delineated in Table 1C, column 6, and have a nucleic acid sequence which is different from that of the BAC fragment having the sequence disclosed in SEQ ID NO:B (see Table 1C, column 5). In additional embodiments, the above-described polynucleotides of the invention comprise, or alternatively consist of, sequences delineated in Table 1C, column 6, and have a nucleic acid sequence which is different from that published for the BAC clone identified as BAC ID NO:A (see Table 1C, column 4). In additional embodiments, the above-described polynucleotides of the invention comprise, or alternatively consist of, sequences delineated in Table 1C, column 6, and have a nucleic acid sequence which is different from that contained in the BAC clone identified as BAC ID NO:A (see Table 1C, column 4). Polypeptides encoded by these polynucleotides, other polynucleotides that encode these polypeptides, and antibodies that bind these polypeptides are also encompassed by the invention. Additionally, fragments and variants of the above-described polynucleotides and polypeptides are also encompassed by the invention.

[0150] Further, representative examples of polynucleotides of the invention comprise, or alternatively consist of, one, two, three, four, five, six, seven, eight, nine, ten, or more of the sequences delineated in column 6 of Table 1C which correspond to the same Clone ID (see Table 1C, column 1), or any combination thereof. Additional, representative examples of polynucleotides of the invention comprise, or alternatively consist of, one, two, three, four, five, six, seven, eight, nine, ten, or more of the complementary strand(s) of the sequences delineated in column 6 of Table 1C which correspond to the same Clone ID (see Table 1C, column 1), or any combination thereof. In further embodiments, the above-described polynucleotides of the invention comprise, or alternatively consist of, sequences delineated in column 6 of Table 1C which correspond to the same Clone ID (see Table 1C, column 1) and have a nucleic acid sequence which is different from that of the BAC fragment having the sequence disclosed in SEQ ID NO:B (see Table 1C, column 5). In additional embodiments, the above-described polynucleotides of the invention comprise, or alternatively consist of, sequences delineated in column 6 of Table 1C which correspond to the same Clone ID (see Table 1C, column 1) and have a nucleic acid sequence which is different from that published for the BAC clone identified as BAC ID NO:A (see Table 1C, column 4). In additional embodiments, the above-described polynucleotides of the invention comprise, or alternatively consist of, sequences delineated in column 6 of Table 1C which correspond to the same Clone ID (see Table 1C, column 1) and have a nucleic acid sequence which is different from that contained in the BAC clone identified as BAC ID NO:A (see Table 1C, column 4). Polypeptides encoded by these polynucleotides, other polynucleotides that encode these polypeptides, and antibodies that bind these polypeptides are also encompassed by the invention. Additionally, fragments and variants of the above-described polynucleotides and polypeptides are also encompassed by the invention.

[0151] Further, representative examples of polynucleotides of the invention comprise, or alternatively consist of, one, two, three, four, five, six, seven, eight, nine, ten, or more of the sequences delineated in column 6 of Table 1C which correspond to the same contig sequence identifier SEQ ID NO:X (see Table 1C, column 2), or any combination thereof. Additional, representative examples of polynucleotides of the invention comprise, or alternatively consist of, one, two, three, four, five, six, seven, eight, nine, ten, or more of the complementary strand(s) of the sequences delineated in column 6 of Table 1C which correspond to the same contig sequence identifier SEQ ID NO:X (see Table 1C, column 2), or any combination thereof. In further embodiments, the above-described polynucleotides of the invention comprise, or alternatively consist of, sequences delineated in column 6 of Table 1C which correspond to the same contig sequence identifier SEQ ID NO:X (see Table 1C, column 2) and have a nucleic acid sequence which is different from that of the BAC fragment having the sequence disclosed in SEQ ID NO:B (see Table 1C, column 5). In additional embodiments, the above-described polynucleotides of the invention comprise, or alternatively consist of, sequences delineated in column 6 of Table 1C which correspond to the same contig sequence identifier SEQ ID NO:X (see Table 1C, column 2) and have a nucleic acid sequence which is different from that published for the BAC clone identified as BAC ID NO:A (see Table 1C, column 4). In additional embodiments, the above-described polynucleotides of the invention comprise, or alternatively consist of, sequences delineated in column 6 of Table 1C which correspond to the same contig sequence identifier SEQ ID NO:X (see Table 1C, column 2) and have a nucleic acid sequence which is different from that contained in the BAC clone identified as BAC ID NO:A (See Table 1C, column 4). Polypeptides encoded by these polynucleotides, other polynucleotides that encode these polypeptides, and antibodies that bind these polypeptides are also encompassed by the invention. Additionally, fragments and variants of the above-described polynucleotides and polypeptides are also encompassed by the invention.

[0152] Moreover, representative examples of polynucleotides of the invention comprise, or alternatively consist of, one, two, three, four, five, six, seven, eight, nine, ten, or more of the sequences delineated in the same row of Table 1C column 6, or any combination thereof. Additional, representative examples of polynucleotides of the invention comprise, or alternatively consist of, one, two, three, four, five, six, seven, eight, nine, ten, or more of the complementary strand(s) of the sequences delineated in the same row of Table 1C column 6, or any combination thereof. In preferred embodiments, the polynucleotides of the invention comprise, or alternatively consist of, one, two, three, four, five, six, seven, eight, nine, ten, or more of the complementary strand(s) of the sequences delineated in the same row of Table 1C column 6, wherein sequentially delineated sequences in the table (i.e. corresponding to those exons located closest to each other) are directly contiguous in a 5′ to 3′ orientation. In further embodiments, above-described polynucleotides of the invention comprise, or alternatively consist of, sequences delineated in the same row of Table 1C, column 6, and have a nucleic acid sequence which is different from that of the BAC fragment having the sequence disclosed in SEQ ID NO:B (see Table 1C, column 5). In additional embodiments, the above-described polynucleotides of the invention comprise, or alternatively consist of, sequences delineated in the same row of Table 1C, column 6, and have a nucleic acid sequence which is different from that published for the BAC clone identified as BAC ID NO:A (see Table 1C, column 4). In additional embodiments, the above-described polynucleotides of the invention comprise, or alternatively consist of, sequences delineated in the same row of Table 1C, column 6, and have a nucleic acid sequence which is different from that contained in the BAC clone identified as BAC ID NO:A (see Table 1C, column 4). Polypeptides encoded by these polynucleotides, other polynucleotides that encode these polypeptides, and antibodies that bind these polypeptides are also encompassed by the invention.

[0153] In additional specific embodiments, polynucleotides of the invention comprise, or alternatively consist of, one, two, three, four, five, six, seven, eight, nine, ten, or more of the sequences delineated in column 6 of Table 1C, and the polynucleotide sequence of SEQ ID NO:X (e.g., as defined in Table 1C, column 2) or fragments or variants thereof. Polypeptides encoded by these polynucleotides, other polynucleotides that encode these polypeptides, and antibodies that bind these polypeptides are also encompassed by the invention.

[0154] In additional specific embodiments, polynucleotides of the invention comprise, or alternatively consist of, one, two, three, four, five, six, seven, eight, nine, ten, or more of the sequences delineated in column 6 of Table 1C which correspond to the same Clone ID (see Table 1C, column 1), and the polynucleotide sequence of SEQ ID NO:X (e.g., as defined in Table 1A, Table 1B, or Table 1C) or fragments or variants thereof. In preferred embodiments, the delineated sequence(s) and polynucleotide sequence of SEQ ID NO:X correspond to the same Clone ID. Polypeptides encoded by these polynucleotides, other polynucleotides that encode these polypeptides, and antibodies that bind these polypeptides are also encompassed by the invention.

[0155] In further specific embodiments, polynucleotides of the invention comprise, or alternatively consist of, one, two, three, four, five, six, seven, eight, nine, ten, or more of the sequences delineated in the same row of column 6 of Table 1C, and the polynucleotide sequence of SEQ ID NO:X (e.g., as defined in Table 1A, Table 1B, or Table 1C) or fragments or variants thereof. In preferred embodiments, the delineated sequence(s) and polynucleotide sequence of SEQ ID NO:X correspond to the same row of column 6 of Table 1C. Polypeptides encoded by these polynucleotides, other polynucleotides that encode these polypeptides, and antibodies that bind these polypeptides are also encompassed by the invention.

[0156] In additional specific embodiments, polynucleotides of the invention comprise, or alternatively consist of a polynucleotide sequence in which the 3′ 10 polynucleotides of one of the sequences delineated in column 6 of Table 1C and the 5′ 10 polynucleotides of the sequence of SEQ ID NO:X are directly contiguous. Nucleic acids which hybridize to the complement of these 20 contiguous polynucleotides under stringent hybridization conditions or alternatively, under lower stringency conditions, are also encompassed by the invention. Polypeptides encoded by these polynucleotides and/or nucleic acids, other polynucleotides and/or nucleic acids that encode these polypeptides, and antibodies that bind these polypeptides are also encompassed by the invention. Additionally, fragments and variants of the above-described polynucleotides, nucleic acids, and polypeptides are also encompassed by the invention.

[0157] In additional specific embodiments, polynucleotides of the invention comprise, or alternatively consist of, a polynucleotide sequence in which the 3′ 10 polynucleotides of one of the sequences delineated in column 6 of Table 1C and the 5′ 10 polynucleotides of a fragment or variant of the sequence of SEQ ID NO:X are directly contiguous Nucleic acids which hybridize to the complement of these 20 contiguous polynucleotides under stringent hybridization conditions or alternatively, under lower stringency conditions, are also encompassed by the invention. Polypeptides encoded by these polynucleotides and/or nucleic acids, other polynucleotides and/or nucleic acids encoding these polypeptides, and antibodies that bind these polypeptides are also encompassed by the invention. Additionally, fragments and variants of the above-described polynucleotides, nucleic acids, and polypeptides are also encompassed by the invention.

[0158] In specific embodiments, polynucleotides of the invention comprise, or alternatively consist of, a polynucleotide sequence in which the 3′ 10 polynucleotides of the sequence of SEQ ID NO:X and the 5′ 10 polynucleotides of the sequence of one of the sequences delineated in column 6 of Table 1C are directly contiguous. Nucleic acids which hybridize to the complement of these 20 contiguous polynucleotides under stringent hybridization conditions or alternatively, under lower stringency conditions, are also encompassed by the invention. Polypeptides encoded by these polynucleotides and/or nucleic acids, other polynucleotides and/or nucleic acids encoding these polypeptides, and antibodies that bind these polypeptides are also encompassed by the invention. Additionally, fragments and variants of the above-described polynucleotides, nucleic acids, and polypeptides are also encompassed by the invention.

[0159] In specific embodiments, polynucleotides of the invention comprise, or alternatively consist of, a polynucleotide sequence in which the 3′ 10 polynucleotides of a fragment or variant of the sequence of SEQ ID NO:X and the 5′ 10 polynucleotides of the sequence of one of the sequences delineated in column 6 of Table 1C are directly contiguous. Nucleic acids which hybridize to the complement of these 20 contiguous polynucleotides under stringent hybridization conditions or alternatively, under lower stringency conditions, are also encompassed by the invention. Polypeptides encoded by these polynucleotides and/or nucleic acids, other polynucleotides and/or nucleic acids encoding these polypeptides, and antibodies that bind these polypeptides are also encompassed by the invention. Additionally, fragments and variants of the above-described polynucleotides, nucleic acids, and polypeptides, are also encompassed by the invention.

[0160] In further specific embodiments, polynucleotides of the invention comprise, or alternatively consist of, a polynucleotide sequence in which the 3′ 10 polynucleotides of one of the sequences delineated in column 6 of Table 1C and the 5′ 10 polynucleotides of another sequence in column 6 are directly contiguous. Nucleic acids which hybridize to the complement of these 20 contiguous polynucleotides under stringent hybridization conditions or alternatively, under lower stringency conditions, are also encompassed by the invention. Polypeptides encoded by these polynucleotides and/or nucleic acids, other polynucleotides and/or nucleic acids encoding these polypeptides, and antibodies that bind these polypeptides are also encompassed by the invention. Additionally, fragments and variants of the above-described polynucleotides, nucleic acids, and polypeptides are also encompassed by the invention.

[0161] In specific embodiments, polynucleotides of the invention comprise, or alternatively consist of, a polynucleotide sequence in which the 3′ 10 polynucleotides of one of the sequences delineated in column 6 of Table 1C and the 5′ 10 polynucleotides of another sequence in column 6 corresponding to the same Clone ID (see Table 1C, column 1) are directly contiguous. Nucleic acids which hybridize to the complement of these 20 lower stringency conditions, are also encompassed by the invention. Polypeptides encoded by these polynucleotides and/or nucleic acids, other polynucleotides and/or nucleic acids encoding these polypeptides, and antibodies that bind these polypeptides are also encompassed by the invention. Additionally, fragments and variants of the above-described polynucleotides, nucleic acids, and polypeptides are also encompassed by the invention.

[0162] In specific embodiments, polynucleotides of the invention comprise, or alternatively consist of, a polynucleotide sequence in which the 3′ 10 polynucleotides of one sequence in column 6 corresponding to the same contig sequence identifer SEQ ID NO:X (see Table 1C, column 2) are directly contiguous. Nucleic acids which hybridize to the complement of these 20 contiguous polynucleotides under stringent hybridization conditions or alternatively, under lower stringency conditions, are also encompassed by the invention. Polypeptides encoded by these polynucleotides and/or nucleic acids, other polynucleotides and/or nucleic acids encoding these polypeptides, and antibodies that bind these polypeptides are also encompassed by the invention. Additionally, fragments and variants of the above-described polynucleotides, nucleic acids, and polypeptides are also encompassed by the invention.

[0163] In specific embodiments, polynucleotides of the invention comprise, or alternatively consist of a polynucleotide sequence in which the 3′ 10 polynucleotides of one of the sequences delineated in column 6 of Table 1C and the 5′ 10 polynucleotides of another sequence in column 6 corresponding to the same row are directly contiguous. In preferred embodiments, the 3′ 10 polynucleotides of one of the sequences delineated in column 6 of Table 1C is directly contiguous with the 5′ 10 polynucleotides of the next sequential exon delineated in Table 1C, column 6. Nucleic acids which hybridize to the complement of these 20 contiguous polynucleotides under stringent hybridization conditions or alternatively, under lower stringency conditions, are also encompassed by the invention. Polypeptides encoded by these polynucleotides and/or nucleic acids, other polynucleotides and/or nucleic acids encoding these polypeptides, and antibodies that bind these polypeptides are also encompassed by the invention. Additionally, fragments and variants of the above-described polynucleotides, nucleic acids, and polypeptides are also encompassed by the invention.

[0164] Table 3: Many polynucleotide sequences, such as EST sequences, are publicly available and accessible through sequence databases and may have been publicly available prior to conception of the present invention. Preferably, such related polynucleotides are specifically excluded from the scope of the present invention. Accordingly, for each contig sequence (SEQ ID NO:X) listed in the fifth column of Table 1A and/or the fourth column of Table 1B, preferably excluded are one or more polynucleotides comprising a nucleotide sequence described by the general formula of a−b, where a is any integer between 1 and the final nucleotide minus 15 of SEQ ID NO:X, b is an integer of 15 to the final nucleotide of SEQ ID NO:X, where both a and b correspond to the positions of nucleotide residues shown in SEQ ID NO:X, and where b is greater than or equal to a+14. More specifically, preferably excluded are one or more polynucleotides comprising a nucleotide sequence described by the general formula of a−b, where a and b are integers as defined in columns 4 and 5, respectively, of Table 3. In specific embodiments, the polynucleotides of the invention do not consist of at least one, two, three, four, five, ten, or more of the specific polynucleotide sequences referenced by the Genbank Accession No. as disclosed in column 6 of Table 3 (including for example, published sequence in connection with a particular BAC clone). In further embodiments, preferably excluded from the invention are the specific polynucleotide sequence(s) contained in the clones corresponding to at least one, two, three, four, five, ten, or more of the available material having the accession numbers identified in the sixth column of this Table (including for example, the actual sequence contained in an identified BAC clone). In no way is this listing meant to encompass all of the sequences which may be excluded by the general formula, it is just a representative example. All references available through these accessions are hereby incorporated by reference in their entirety.

TABLE 3

| | SEQ | | | | |
|---|---|---|---|---|---|
| cDNA | ID | Contig | EST Disclaimer | | |
| Clone ID | NO: X | ID: | Range of a | Range of b | Accession Numbers |
| H2CBU83 | 11 | 884134 | 1-2689 | 15-2703 | BE613316, BE739453, AW961199, AV658769, BE785673, |
| | | | | | AW963999, BF037119, BG030580, |
| | | | | | BF036149, BF699154, BF033837, BF697524, BF695458, |
| | | | | | BF036638, BF701778, BG030507, AW377122, |
| | | | | | BF665913, BF699078, AW377125, BF665294, AV658829, |
| | | | | | BF667082, BG166746, AW851261, |
| | | | | | BF241480, AW850925, AI978869, BF695890, AA845339, |
| | | | | | BF668201, BF699860, BF085620, AA405940, |
| | | | | | BE612726, BF666583, BF667787, BE739116, BF665805, |
| | | | | | AW752845, BF701466, AI800939, BG121547, |
| | | | | | AI620357, BF700054, AW851052, AI924880, AW752835, |
| | | | | | AI800807, BF697582, BF700919, BF667321, |
| | | | | | AI139396, BE958619, AV692286, AI955392, AW752844, |
| | | | | | BE042841, BF698625, BF244588, |
| | | | | | AW440250, BF698345, AW152584, AW955901, AI671911, |
| | | | | | AA535832, AW850982, AI935579, |
| | | | | | BE089877, AW752868, AI683119, BF130660, D61864, |
| | | | | | AW630835, AI621153, BF514638, BF697211, |
| | | | | | AW192136, AI286255, AA403153, D62117, AW028833, |
| | | | | | N78154, BF154792, BF665821, AI538061, |
| | | | | | N64201, AW851056, AW938593, BE093579, AW938596, |
| | | | | | AA928873, AV651183, BE817020, |
| | | | | | AV657915, AV657131, BF666276, AV660141, AI699025, |
| | | | | | AI016115, R66206, N45586, D61708, |
| | | | | | BE868472, AA403241, AV657914, AA313513, AV682813, |
| | | | | | H88565, AA531589, R58698, AA857811, |
| | | | | | H42631, AA307010, R67084, BF334107, AW971385, |
| | | | | | R68027, AW021104, AW296538, BG166828, |
| | | | | | AI887214, AW468968, R64487, H88521, BF697149, |
| | | | | | R94825, R68028, R92884, R65584, AA377208, |
| | | | | | AI050980, AA318641, D62093, BF813323, N78160, |
| | | | | | T73957, D61982, D62303, D62026, AI806100, |
| | | | | | AA095925, N56560, T73925, AA507092, BF750358, |
| | | | | | BE148612, BF750357, BE867141, T73948, |
| | | | | | N88292, T73916, BE044052, H95089, H73281, |
| | | | | | AV660091, AF257182.1, AF346711.1. |
| H6EDC19 | 12 | 543259 | 1-746 | 15-760 | AI090153, AI767722, BG116691, AI797075, BF528376, |
| | | | | | AI698172, AI681570, BE671343, AI539236, |
| | | | | | AV704244, AI539246, BE264613, AA864681, AW204700, |
| | | | | | AI808925, BE676036, T79284, BF445461, |
| | | | | | AA400027, AI209219, AA300244, AA427390, AA302217, |
| | | | | | AA252421, AA406631, AI869251, |
| | | | | | BF969629, AI262951, AI498669, AA300243, AW072158, |
| | | | | | T79197, AA411721, AV682333, F34003, |
| | | | | | AI123608. |
| HACBD91 | 13 | 637482 | 1-1431 | 15-1445 | AI123694, AA203656, AV707802, BF575227, N77966, |
| | | | | | AW956121, N71852, BF732312, AI338999, |
| | | | | | AA704675, AI742966, AA176725, AV744696, AI039168, |
| | | | | | AA329423, AA680411, F10345, T85994, |
| | | | | | AV682639, AA731436, AV735262, AV733694, AA505796, |
| | | | | | AW959998, BF793146, H79631, R00088, |
| | | | | | BF978632, BG034327, AV716953, AW955313, BG032189, |
| | | | | | AV717860, AV716893, BF244606, |
| | | | | | AV733654, BG030662, AI802907, AA528524, AA973692, |
| | | | | | AA658895, AV714250, AV718258, |
| | | | | | AV716004, BF029739, F26324, AW772717, BE909294, |
| | | | | | AA370595, AI392630, BF529817, AI914394, |
| | | | | | BE748127, AA975366, BF029799, AI126532, AA977864, |
| | | | | | R38577, AI093884, AW264528, AI351443, |
| | | | | | AA916014, AA359165, AA594324, AI682171, AA404535, |
| | | | | | BG034254, T75123, AI832970, AA973611, |
| | | | | | AI833308, AI814033, BE781781, BF035996, BF036344, |
| | | | | | AA888167, BE541776, BF109665, BE551387, |
| | | | | | AI268514, AV710503, AI709250, F33691, BF216659, |
| | | | | | F33502, BE467615, AV738506, BE503802, |
| | | | | | AV763934, BG110890, AV742881, AV710956, BF965198, |
| | | | | | BG033031, T90966, R02459, F32392, |
| | | | | | BF029956, BF690853, AV764373, BE738142, BF244383, |
| | | | | | AW772766, BF978393, BF030821, |
| | | | | | BE548289, N64163, BF576733, AW872492, BE218579, |
| | | | | | BE539011, BE042987, BF978138, BE217894, |
| | | | | | BF692527, AW419258, BF219313, BF244019, R02355, |
| | | | | | BF242775, AA340839, AW440167, F30529, |
| | | | | | BE748667, AA640120, BG179795, BF679132, BF382290, |
| | | | | | AI719390, R35603, BF240791, BF691038, |
| | | | | | AW009337, AA886535, BE738709, AI253328, AW268515, |
| | | | | | BF977850, H79632, AV764541, BF214426, |
| | | | | | BE184678, BE171856, BF382191, F12739, BF031722, |
| | | | | | BE564110, F21702, BF219100, F26311, F27624, |
| | | | | | F31646, F24066, F30253, F21442, BF030470, |
| | | | | | BF215493, AA365400, AV725369, BF243623, BF216495, |
| | | | | | F23622, R38445, Z20180, F23439, BF031636, |
| | | | | | AA340808, BF246303, F29361, BF212059, D19917, |
| | | | | | BF210763, AI720401, N58379, AA706899, BE737668, |
| | | | | | F37786, AC009289.8, BC000855.1, |
| | | | | | AF044957.1, AC008804.6. |
| HACCI17 | 14 | 891114 | 1-1708 | 15-1722 | AL538454, BF530920, BF530060, AI970528, AI860328, |
| | | | | | BF527064, AI798917, AL538453, BG054790, |
| | | | | | AI923543, BF219866, BF528175, AV752086, BF526803, |
| | | | | | AI800076, BF526264, AW206433, AI337330, |
| | | | | | AW245447, AW237083, BE858481, BE466614, BF437709, |
| | | | | | AI497639, AI160768, AW245805, |
| | | | | | AA131235, BE672804, AI160855, BF109500, AI675102, |
| | | | | | AI804002, BG060000, BF222422, AI982947, |
| | | | | | AI355974, AW590096, AI418181, AI312842, BF224013, |
| | | | | | AI088289, BG056127, AI332684, AI341205, |
| | | | | | AI654907, AI083806, AI798674, AI470925, AI190394, |
| | | | | | AW139187, AI092606, BF222526, AI291977, |
| | | | | | AI611140, AW135968, AW204680, BF106163, AW025331, |
| | | | | | AI167288, AI656880, BG058349, |
| | | | | | AA971379, AI399811, R72939, AA037774, AI150867, |
| | | | | | AI928634, AW302173, AI918209, AI350940, |
| | | | | | R73561, AA034204, BG152416, AI810527, AA621414, |
| | | | | | BF061361, AI783733, AI817644, H94482, |
| | | | | | R60154, T35689, BE504130, BF111371, BF725784, |
| | | | | | AI970869, BF056386, BF445420, AI925534, |
| | | | | | BF831443, AA885412, H49844, AW572977, BF939724, |
| | | | | | BF220095, R60153, F37217, BF525690, |
| | | | | | AI654502, AW189678, AA131356, BC002404.1, AF000959.1, |
| | | | | | AC000082.4, AC000071.2, |
| | | | | | AC000088.2, T69988, N39621, N46769, AA034265, |
| | | | | | AA918849, AA707092, AA758314, Z38200, |
| | | | | | AA772946, AI418724, AI420314, AI423722, AI423730. |
| HAGAQ26 | 15 | 561996 | 1-1319 | 15-1333 | BF111995, BF111899, AW051348, AI807015, AA349378, |
| | | | | | AA349433, H05458, T39468, T39511, |
| | | | | | F02812, T50009, T50073, Z43427, AI372659, |
| | | | | | BE843943, BE843903, AA860404, BG015163, BE938621, |
| | | | | | BE843892, AI372657, BE698483, BF092079, BE301746, |
| | | | | | BG015653, AA496848, AL045349, BE047833, |
| | | | | | BE965724, BE965432, BE875407, BE964497, AW059713, |
| | | | | | AL037454, BE964512, AL119836, |
| | | | | | BE967307, AI918408, BG180506, BE964876, BF924856, |
| | | | | | AI683559, AW151136, BG107576, BE965067, |
| | | | | | AW268261, AI691088, AI798271, AV689111, BG253692, |
| | | | | | BE011885, AI868163, AI918634, AW084097, |
| | | | | | BE875022, BE879931, AI340603, AV728806, AL036652, |
| | | | | | BF814335, AI370392, BE963838, AV725920, |
| | | | | | AW021717, AW089036, BE877142, BE964795, AI469516, |
| | | | | | AI805638, AI925404, AA291456, |
| | | | | | AL040694, AI285439, AA888196, BE966404, BE965758, |
| | | | | | BE965355, BE544111, BG180273, AI366968, |
| | | | | | AW022682, AV742698, AI560679, AI345608, BE967149, |
| | | | | | AI366959, AI473536, BG153056, BE964614, |
| | | | | | BE540578, AI349933, AI623736, AW020095, BF038804, |
| | | | | | BE908276, AV742475, AI345471, BE966787, |
| | | | | | AI343091, AI345677, BE966011, BE965621, AI340519, |
| | | | | | AW162189, BF814357, AW198144, AI446809, |
| | | | | | AV717295, AV716613, AV682144, AI366992, AA806719, |
| | | | | | AV682099, BE964661, AA789133, |
| | | | | | BE963918, BE904051, AW023338, AV738730, BE873776, |
| | | | | | BG027082, BF032404, BG164035, |
| | | | | | BE613727, BG032219, AI863357, BF965884, AL048323, |
| | | | | | BG153050, AI636719, AV756658, |
| | | | | | AW827289, AL048340, BE879905, BG109270, AW020693, |
| | | | | | AI686576, AW858254, BE964073, |
| | | | | | AI470293, AW827290, AW058233, AL038605, BG107625, |
| | | | | | AI702527, BG260037, AW834325, |
| | | | | | BE047952, BF793031, AA643235, AI418254, AI623905, |
| | | | | | AI538764, AI524654, AI249946, BE964006, |
| | | | | | AA848053, AV733819, AA635382, H42825, AI929108, |
| | | | | | BF924884, BG029053, BE974031, AI473451, |
| | | | | | AV711509, BG252714, AL048644, BF868927, AL040241, |
| | | | | | BE883591, BF968622, AW068845, |
| | | | | | AI624293, BF813196, AW022494, BF340323, AL046463, |
| | | | | | AW020288, AI521596, AW021373, |
| | | | | | AW162194, BF915316, BF925370, BF886214, AI923989, |
| | | | | | BE965481, AI868204, AI242736, BE891942, |
| | | | | | BE735380, BF909758, AA579232, BG166687, AV715354, |
| | | | | | BE964767, AV756247, AV758825, |
| | | | | | BF814449, AL038445, BE965121, AW163834, BF343521, |
| | | | | | AW084056, BG032169, BE904851, |
| | | | | | BF868811, BG104782, AI537677, BG122101, AI628325, |
| | | | | | AI590645, BE875402, AW083804, AI561299, |
| | | | | | BE908335, AW059828, BF753056, AI559863, AV726125, |
| | | | | | BF750879, AW265004, F26535, AI583032, |
| | | | | | BF811808, AI366974, AI355765, BF822127, AI609593, |
| | | | | | AI887775, AI858865, AI500061, BG121959, |
| | | | | | AA572758, BF699668, AI348897, BE778024, BF814504, |
| | | | | | AI345224, AI357599, AV681949, T99953, |
| | | | | | AI589428, BG113851, BG110517, AL530922, AF169301.1, |
| | | | | | AC091736.1, AL442082.1, |
| | | | | | AB049853.1, AL389935.1, BC007364.1, S78214.1, X99717.1, |
| | | | | | AL122121.1, AK027161.1, |
| | | | | | BC006195.1, BC001418.2, BC005858.1, AK000310.1, S77771.1, |
| | | | | | AL389939.1, AF090900.1, |
| | | | | | AF090934.1, BC003104.1, AK025092.1, AK024524.1, AB047897.1, |
| | | | | | BC007674.1, AB044547.1, |
| | | | | | AL136789.1, BC004874.1, AL122045.1, AK026506.1, AL389978.1, |
| | | | | | AL049464.1, AF067420.1, |
| | | | | | BC007355.1, M86826.1, AB063071.1, AL110196.1, BC001293.1, |
| | | | | | BC007998.1, BC006287.1, |
| | | | | | AL096751.1, AL133565.1, AF057300.1, AF057299.1, Y10080.1, |
| | | | | | BC008387.1, AK026518.1, |
| | | | | | AL133081.1, AL162006.1, U42031.1, AK027142.1, U51587.1, |
| | | | | | AF177336.1, AK000137.1, |
| | | | | | AL157479.1, AL137547.1, AL133093.1, AB063008.1, AK025431.1, |
| | | | | | AL390167.1, BC008673.1, |
| | | | | | BC000317.1, AB047869.1, AF205861.1, BC003650.1, AL133560.1, |
| | | | | | AK024538.1, BC000799.1, |
| | | | | | AK026480.1, AF218014.1, AL049382.1, AK027182.1, AK000421.1, |
| | | | | | AK000323.1, S76508.1, |
| | | | | | BC001774.1, AB051158.1, AB047615.1, AL137523.1, AL353957.1, |
| | | | | | U58996.2, AB055303.1, |
| | | | | | Z37987.1, AB060887.1, AK026452.1, BC008025.1, AL050170.1, |
| | | | | | BC003687.1, AK026395.1, |
| | | | | | AB060912.1, AL122111.1, AB060863.1, BC005160.1, AB056809.1, |
| | | | | | AB052191.1, Y14314.1, |
| | | | | | AK026927.1, AL096744.1, AL137658.1, AL137705.1, AL137292.1, |
| | | | | | BC000778.1, BC008185.1, |
| | | | | | S61953.1, AL137283.1, AF097996.1, AL049430.1, AL390154.1, |
| | | | | | BC006164.1, AL512718.1, |
| | | | | | AL049314.1, J05032.1, AL117583.1, AB063046.1, AF110640.1, |
| | | | | | BC001349.1, AF120268.1, |
| | | | | | AK000212.1, AK000083.1, BC006180.1, AK027164.1, AB047801.1, |
| | | | | | BC007534.1, BC000556.1, |
| | | | | | BC004905.1, AL110224.1, BC007021.1, AK026462.1, AL356278.8, |
| | | | | | AF162270.1, AL050277.1, |
| | | | | | BC008070.1, AL512684.1, AB047966.1, BC006408.1, AF225424.1, |
| | | | | | AK000655.1, AB060856.1, |
| | | | | | AK025573.1, BC001056.1, AB047631.1, BC005890.1, AL137273.1, |
| | | | | | BC004370.1, AF207829.1, |
| | | | | | BC002491.1, D83989.1, BC004943.1, AF239683.1, BC005007.1, |
| | | | | | AF111112.1, AL122049.1, |
| | | | | | BC009033.1, L19437.2, AK026086.1, AB060883.1, AK026045.1, |
| | | | | | AB056420.1, AF305835.1, |
| | | | | | AB060903.1, AK026434.1, AL133568.1, AL122118.1, AL050393.1, |
| | | | | | AL137476.1, AC023880.5, |
| | | | | | AL117435.1, AK026534.1, BC000348.1, BC005678.1, AJ001838.1, |
| | | | | | S78453.1, AL136767.1, |
| | | | | | X76228.1, M64349.1, BC005151.1, AB055370.1, AB060893.1, |
| | | | | | BC001963.1, AF159615.1, |
| | | | | | AK026603.1, AL512689.1, AL133075.1, BC007680.1, AL136754.1, |
| | | | | | AK025708.1, AL050146.1, |
| | | | | | AF217991.1, AL117440.1, BC007897.1, AL136766.1, AL117629.1, |
| | | | | | BC006133.1, AK000450.1, |
| | | | | | AK026592.1, AF003737.1, AL050024.1, X69819.1, AB049900.1, |
| | | | | | AK025958.1, AK025084.1, |
| | | | | | L30117.1, AL080074.1, AB048974.1, AB063084.1, BC002471.1, |
| | | | | | BC006411.1, AK025772.1, |
| | | | | | AF090896.1, AL137488.1, BC000066.1, AK026551.1, U77594.1, |
| | | | | | BC002777.1, AL353802.14, |
| | | | | | AF271350.1, BC000632.1, AK026533.1, BC009026.1, BC003683.1, |
| | | | | | AK027096.1, AK025414.1, |
| | | | | | AB050411.1, AK027104.1, AK026353.1, BC002541.1, BC004297.1, |
| | | | | | U39656.1, AK026522.1, |
| | | | | | AB050534.1, AL136644.1, BC006440.1, AK026885.1, AK026571.1, |
| | | | | | BC003682.1, AK025541.1, |
| | | | | | AL136843.1, BC004431.1, AF132730.1, AF219137.1, AL137574.1, |
| | | | | | AF090886.1, AL136893.1, |
| | | | | | AK024944.1, AK025015.1, AL050116.1. |
| HAGFI62 | 17 | 704425 | 1-989 | 15-1003 | AI693333, AA774471, H49659, AA009946, AW664812, |
| | | | | | AI217416, R56893, T88930, H44134, R67277, |
| | | | | | F10016, R52911, R39072, D61015, AI972242, |
| | | | | | Z44064, BF790840, AI090826, F06072, Z38995, R35532, |
| | | | | | AF131817.1, AF198490.1, AF181450.3. |
| HAHDB16 | 18 | 635412 | 1-782 | 15-796 | AI688902, AI983921, AA843874, AA745961, AU150602, |
| | | | | | BG169215, AW571697, AA581433, |
| | | | | | AI685116, AW190486, AA152091, AI927861, BG059728, |
| | | | | | AI811494, AW089655, AI924175, |
| | | | | | AU118990, AI872415, AI858607, AI610776, BE044603, |
| | | | | | H97952, AF063514, AL137994, AV719347, |
| | | | | | AA189081, AW177120, AL133942, AW090739, AA767353, |
| | | | | | AW167319, AU145663, AA724159, |
| | | | | | AA493998, AA773359, AI367384, W49501, AI925647, |
| | | | | | AI334099, AA631430, AU143906, AI874256, |
| | | | | | AI264673, AI887321, AA160519, AL119355, BE646447, |
| | | | | | AW468887, AI749571, AW177226, AI761656, |
| | | | | | BF882284, AI801377, AW177317, AV726924, AU121759, |
| | | | | | AL036881, AI082077, AW177231, |
| | | | | | AI088796, AI675848, T16214, AI818151, AI627862, |
| | | | | | AW994225, AW084901, AW177264, AI250812, |
| | | | | | AU157470, AV730063, N64574, AI625127, BF056069, |
| | | | | | AW073349, AI735074, AI590151, N24958, |
| | | | | | AW813744, AI963795, N76274, AI732743, AI560839, |
| | | | | | AA174085, C06012, AA085707, AI811854, |
| | | | | | AA601264, W03759, AW090210, T69719, AW177237, |
| | | | | | AV699636, AI570877, BF823687, AI418614, |
| | | | | | BE379085, AA152017, BF436023, AA953572, AI433018, |
| | | | | | H91008, BF930080, AA709024, N79242, |
| | | | | | AU145674, H64113, AV720543, AI346802, AI568919, |
| | | | | | AU146451, AA287329, AW242205, H90881, |
| | | | | | AW242735, AA778304, AI034217, AU145383, AW589529, |
| | | | | | AI628043, AI027421, AW235478, |
| | | | | | AI860964, AI499811, AU146974, BE148908, AI375534, |
| | | | | | AA946637, AA807609, AW157413, AI683685, |
| | | | | | BF760502, AW589501, W87732, AA524883, W58442, |
| | | | | | AA678653, AI591192, AI189033, BF439824, |
| | | | | | AA470572, AA136637, M62281, AI632138, R48563, |
| | | | | | BE247178, AI272961, AI376984, AI524521, |
| | | | | | AI197934, AI025602, AW874038, AU143935, BG235936, |
| | | | | | AU144339, AI955464, AA782144, R80440, |
| | | | | | R94240, W33199, AI973178, AI891085, AI095849, |
| | | | | | BG059067, AL041411, AI358417, AI734140, |
| | | | | | AW838708, BE673863, R91915, N79835, BF888049, |
| | | | | | AW473240, AI091583, BF063798, AU147980, |
| | | | | | AA136576, BF875698, AL047920, AI290861, AI051363, |
| | | | | | AI917243, AA825161, BF594091, AI453790, |
| | | | | | AC008496.5, AL390035.10, AJ229041.1, AP001724.1, AL163267.2, |
| | | | | | AL121767.6, AC016759.11, |
| | | | | | AL390838.26, AC007671.7, AL109799.6, AP001683.1, AC024057.4, |
| | | | | | AC087187.1, AC006007.1, |
| | | | | | AC007683.5, AP002026.1, AC069223.15, AL449104.5, AC016925.15, |
| | | | | | AL354913.11, |
| | | | | | AC078843.2, AL135926.12, AC002449.1, AL450340.13, AL022401.1, |
| | | | | | AC012000.3, |
| | | | | | AL391986.12, AL078591.18, AC009320.7, AC013448.7, AC007321.2, |
| | | | | | AL034369.1, |
| | | | | | AC012081.16, AL121823.12, AC002300.1, AL590404.5, AC040171.3, |
| | | | | | AC005610.1, |
| | | | | | AL445306.7, AL359914.14, AL031319.5, AL353684.8, AL162759.4, |
| | | | | | AL049565.3, AC001231.2, |
| | | | | | AC008170.2, AL031183.4, AC016568.4, AL451049.11, AL049588.11, |
| | | | | | AP001729.1, AC010142.4, |
| | | | | | AC083861.2, AF020802.2, AP000810.5, AL163282.2, AL139115.5, |
| | | | | | AL022397.1, AC003969.1, |
| | | | | | AL445468.8, AC018645.4, AL355593.21, AL159986.21, AL358341.3, |
| | | | | | AL136147.10, |
| | | | | | AC079147.5, Z84487.2, AL132821.17, AC022710.10, AC073348.8, |
| | | | | | AC006206.3, AL365204.11, |
| | | | | | AL445465.10, AC005243.1, AC067945.4, AL589786.8, AC012323.7, |
| | | | | | AL132715.3, AJ225782.1, |
| | | | | | AC090043.1, AC079905.28, AF274857.1, AC004066.1, AL355294.14, |
| | | | | | AC010133.4, AP001690.1, |
| | | | | | AC009274.9, AC005823.1, AP001331.1, AJ271736.1, AL136133.14, |
| | | | | | AL031671.12, |
| | | | | | AC063947.30, AL161450.14, AL009172.1, AL138479.4, AC018469.5, |
| | | | | | AL359986.15, |
| | | | | | AL133417.10, AC087083.2, Z97196.1, AP000457.3, AL360270.18, |
| | | | | | AL033392.5, AC023134.5, |
| | | | | | AL158201.19, AC079177.21, AC004820.2, AC024093.46, AL359380.16, |
| | | | | | AC006578.5, |
| | | | | | AP001669.1, AC087312.8, AC006365.3, L29074.1, AL359204.10, |
| | | | | | AC011912.7, AC073323.5, |
| | | | | | AL121933.15, AC007748.2, AL359922.10, AP002848.2, AL133553.9, |
| | | | | | Z72001.1, AP002982.2, |
| | | | | | AC078777.15, AC009037.6, AL359077.10, AP000687.2, AC007482.7, |
| | | | | | AF235098.1, AC004617.2, |
| | | | | | AL591046.4, AP003479.1, AC006249.1, AL355357.13, AC005951.1, |
| | | | | | AC004782.1, AL121841.5, |
| | | | | | AL009174.1, AP002532.1, AL135790.7, AL133467.4, AL359265.8, |
| | | | | | AC007037.4, AF042091.1, |
| | | | | | AP001817.2, AP001672.1, AC026164.5, AL355478.16, AC020987.8, |
| | | | | | AC023469.6, AC021713.7, |
| | | | | | AC068660.3, AC083860.2, AC012446.2, AC010482.7, AL355888.3, |
| | | | | | AC011230.3, AL133480.9, |
| | | | | | AC026203.3, AP000650.4, AC090710.16, AL590682.9, AL121788.17, |
| | | | | | AC004998.2, AC026202.6, |
| | | | | | AL137248.21, AC025439.4, AL163280.2, AL391623.13, AL354828.12, |
| | | | | | AL050309.4, |
| | | | | | AC018951.8, AL109755.14, AC019050.4, AC008069.3, AC005859.1, |
| | | | | | AC002288.1, AC002074.1, |
| | | | | | AL136520.3, AC003984.2, AL096829.17, AC034242.5, AC010528.8, |
| | | | | | AL163952.5, AL159982.17, |
| | | | | | AC005883.14, AL513342.7, AC002367.1, AC083865.2, AC008486.6, |
| | | | | | AC008716.6, |
| | | | | | AL035411.27, AC006516.10, AL157902.6, Z92540.1, AL355375.17, |
| | | | | | AL390836.12, AL390857.7, |
| | | | | | AC003958.1, U80459.1, AL021937.1, AL034377.1, Z75741.1, |
| | | | | | AL158147.17, AL359693.11, |
| | | | | | AC010651.7, AL391384.18, AL390882.12, AC000114.1, AC026191.3, |
| | | | | | Z99289.1, AL450338.5, |
| | | | | | AF235093.1, AL050306.5, Z72519.1, AC018714.4, AL139421.11, |
| | | | | | AL121986.12, AL139002.18, |
| | | | | | AL449265.13, AC020704.5, AJ271735.1, AP000857.4, AC008250.23, |
| | | | | | AL355504.17, |
| | | | | | AL354857.13, AL359438.19, AC012603.6, AL049834.3, AL121995.12, |
| | | | | | AL360219.18, |
| | | | | | AL589946.4, AL391379.12, AC011998.8, AC024095.13, AL442203.12, |
| | | | | | AL354858.16, |
| | | | | | AC022081.32, AC073148.7, AL450347.5, AC002556.1, AL158016.15, |
| | | | | | AL121782.9, |
| | | | | | AC005406.2, AC073273.9, AL445493.8, AP001831.4, AC012653.8. |
| HAICP19 | 19 | 422672 | 1-1610 | 15-1624 | AL533390, AL529681, AL528191, BF966576, AL523718, |
| | | | | | AL528190, BG120879, BF115284, |
| | | | | | AL529855, BE785817, BF026199, BF966448, BG114227, |
| | | | | | BE386416, BF115429, BF304689, BF304827, |
| | | | | | BE728367, BE793198, AV704155, AL529854, BE260405, |
| | | | | | BF305469, BE789342, BE297311, |
| | | | | | AW993505, BF316927, AW993825, BE277343, AW993830, |
| | | | | | BE265484, BF727063, AW960096, |
| | | | | | BF831956, AI743647, AW965178, C17555, BF838669, |
| | | | | | AI923650, AI860279, BF057404, AW005358, |
| | | | | | AI146421, BF928251, AI093908, BF747949, BE047374, |
| | | | | | BE813316, AI769656, AA605064, AI241016, |
| | | | | | AI148817, AI318082, W31773, AA565734, AI630731, |
| | | | | | AA843395, AW025017, AI566682, BF955698, |
| | | | | | AA506224, AA749014, AA827318, AW134754, N31961, |
| | | | | | BE774133, F36487, AA346026, T49220, |
| | | | | | AV750102, W04672, F31348, N31991, AI827206, |
| | | | | | AI630730, T49219, BF990595, AI678457, AA879426, |
| | | | | | AA120831, AA948142, AA345290, AI685001, BG007518, |
| | | | | | BG011225, AA120830, BE774243, |
| | | | | | BG004311, BE073338, BF155353, T39496, BE774391, |
| | | | | | BG007508, AW374473, AJ299442.1. |
| HAJBR69 | 22 | 638516 | 1-741 | 15-755 | BE262907, AW503376, AW503644, BF982382, BE079288, |
| | | | | | AW504239, AA701415, BF315343, |
| | | | | | BE277664, BF921555, BF736464, BF756620, BE720223, |
| | | | | | BE815902, AA490675, BE930704, |
| | | | | | AW971745, AW804686, AW392670, BE695785, AW861944, |
| | | | | | AW604723, AW877209, AL119483, |
| | | | | | U46351, AW858526, AW858525, AL042984, AL119497, |
| | | | | | AL119324, AL119319, AL119355, |
| | | | | | AW500561, U46349, AL134538, AL119457, BE705903, |
| | | | | | BE705906, AW577135, AW372827, |
| | | | | | AW384394, AW861889, AW858455, AW363220, U46350, |
| | | | | | Z99396, AL119484, AL119363, AL119391, |
| | | | | | U46347, U46341, AL119443, BF868687, AL119444, |
| | | | | | AL119341, BF868697, AW604726, AL119439, |
| | | | | | BF868684, BE705905, AL119522, AL119396, U46346, |
| | | | | | AL119335, AL134531, AL134533, AL037205, |
| | | | | | AL134920, AL134525, BE705904, AL119399, AL043029, |
| | | | | | AL119496, AL119418, AW861954, U46345, |
| | | | | | AL043011, AL042614, AL042975, AL043033, AL042544, |
| | | | | | AL042965, AL134542, AL042450, |
| | | | | | AL042542, AL043019, AL043003, AL119464, AL042551, |
| | | | | | AB028986.1, AB026436.1. |
| HAMFE15 | 23 | 905695 | 1-4115 | 15-4129 | AL530791, AL530792, AL529741, AL535065, AL535066, |
| | | | | | AU124538, AU133125, BG248951, |
| | | | | | BG170992, BF342607, BE791618, BE788808, BE889885, |
| | | | | | BE899228, BE266316, BF666992, AA604226, |
| | | | | | BE855814, AA858439, BF306389, AW965351, AI459262, |
| | | | | | AI949460, BE566846, AI920795, BF695661, |
| | | | | | AI628581, AI810626, AA213464, BF436958, AI765166, |
| | | | | | BF131526, AA446901, BE669483, BF105045, |
| | | | | | AA165298, AW300022, N48825, AA595754, BE218460, |
| | | | | | BF126313, AA165297, BE044264, AI686706, |
| | | | | | AW300346, BF760498, AI472286, AI804402, AA426331, |
| | | | | | AI278834, AW169453, AW239143, |
| | | | | | AA426332, H29503, AW602873, AA213575, BF376918, |
| | | | | | AV749783, AA075971, AA447021, |
| | | | | | AA074072, BE244841, AI002939, BE832901, AA598694, |
| | | | | | BE694349, AI471852, AI961851, AW136228, |
| | | | | | AI422999, AA707156, H29787, AV692260, AV692283, |
| | | | | | AV692263, BE243932, BE244952, BF330518, |
| | | | | | AV698872, AA333388, AV698900, AV691373, AV695584, |
| | | | | | AV694677, AV687965, AV696854, R13303, |
| | | | | | AA564851, AI762353, BF751566, BE244135, AV690233, |
| | | | | | AV696838, BE463584, T05291, BF878149, |
| | | | | | BE258595, N55929, AV698875, BF238880, AA348529, |
| | | | | | AV689303, T78749, BF736483, BE674953, |
| | | | | | N89249, N45617, D12186, AW961934, BF208387, |
| | | | | | AW418929, AW300980, AI522016, R91823, |
| | | | | | AW293669, W81348, AV649579, N95619, BE503239, |
| | | | | | AI739123, AK001704.1, AJ278150.1, |
| | | | | | AC004918.1, AL049792.11, AC010979.3, AC006396.1, AC005692.1. |
| HAMGR28 | 24 | 892971 | 1-1660 | 15-1674 | AL519641, AL519640, AL525613, AL526308, AL527643, |
| | | | | | AL530324, AL525663, AL525671, |
| | | | | | AL530325, AL515833, AL515832, BF313053, AL527577, |
| | | | | | BF529163, BE312001, BF984557, BF530620, |
| | | | | | BE396752, BE304484, BF983145, BE560368, BF316599, |
| | | | | | BG114646, BE269376, BF313413, BE298748, |
| | | | | | BE440179, AW953553, BF307907, AW978612, BE617303, |
| | | | | | AA845426, AI830874, AI983227, |
| | | | | | AW956917, AW410199, AW628335, BE464326, AA530876, |
| | | | | | AW452186, BE139083, AI829507, |
| | | | | | AI356849, W69111, AW084551, AA406233, AI589504, |
| | | | | | AI970964, AI420766, AI701901, AI130010, |
| | | | | | AI288363, BF571959, AI683363, BE019516, BE206283, |
| | | | | | AW272707, N23238, AA593625, AI000296, |
| | | | | | AA406505, AW593667, AI933020, AI337797, BF691989, |
| | | | | | AI139514, BF062876, W35301, AI418519, |
| | | | | | AV759081, AW514035, AW004995, AW591716, F28754, |
| | | | | | AA815275, AI347528, AI624104, AA574436, |
| | | | | | AI817434, AI025110, T08849, AL527576, AI079740, |
| | | | | | AA962799, AA707405, BF445536, F37186, |
| | | | | | AW207522, AW591663, AW263070, AW510310, AW264517, |
| | | | | | AA028008, T33149, AA723895, |
| | | | | | W69236, R40168, T23442, H88132, H78378, |
| | | | | | AW514039, D12424, W23701, F34521, Z43089, |
| | | | | | BE646197, AI475064, AA653748, AA312858, AW959275, |
| | | | | | AW410198, AI932423, AA121114, |
| | | | | | AA121036, AA295884, AA356831, AI310743, BF513002, |
| | | | | | AA381766, Z39180, R12971, AW379122, |
| | | | | | AI768799, BE877018, AI560685, AA338084, AI810799, |
| | | | | | AW861944, AW750703, F24446, AW972092, |
| | | | | | AW858525, AW877209, AW968355, AW968356, AW972093, |
| | | | | | AW968729, AW971740, AW972091, |
| | | | | | AI431351, AW972090, AW969229, AW858455, AW804686, |
| | | | | | AL119324, AI432644, AI623302, |
| | | | | | AW604723, AW858526, AI432647, AI432653, AW081103, |
| | | | | | AI432661, AI492519, BE672748, |
| | | | | | BC007438.1, AC004150.8, AF064854.1, AB026436.1. |
| HAPBS03 | 25 | 656755 | 1-1489 | 15-1503 | AI742631, AU119590, AU118010, BG259904, AI800165, |
| | | | | | AI800177, AI817228, BG180146, BE813479, |
| | | | | | BE535299, AV725950, AW009788, BE549267, BE894325, |
| | | | | | AV757104, AA173790, BF038610, |
| | | | | | AU150757, AI983626, AU144839, AI580092, AA479607, |
| | | | | | AU145896, N31934, AU144384, W72461, |
| | | | | | AU152288, AI826420, AI817464, AU150963, AU151993, |
| | | | | | BE780217, AU145816, AU160659, |
| | | | | | BF817682, AA486402, AU150397, AW272227, BE813518, |
| | | | | | BE280368, AI400650, AI829127, AI859821, |
| | | | | | BE902423, BE349331, BF326757, AU145027, BE813644, |
| | | | | | AU156304, AU149695, BE902011, |
| | | | | | BE731981, AI200823, BG060141, AU135928, AA812768, |
| | | | | | AW162031, AI804420, AU148793, |
| | | | | | BE350105, AI810286, AI174621, AU160342, BE731153, |
| | | | | | AU156374, AV706272, AA262076, |
| | | | | | AV701945, AW768265, AI436131, AW204987, AW104123, |
| | | | | | BE218179, AU153197, BF970278, |
| | | | | | BF570446, AI092268, AA191221, W76519, AW630344, |
| | | | | | BF973324, BE548188, AW628275, AU157431, |
| | | | | | AI830727, BE045222, AW474225, BE536210, BE927040, |
| | | | | | AW204297, AI095806, BF229981, |
| | | | | | AW075962, AA279162, AI419217, BE504508, AW571815, |
| | | | | | BG059854, AW054950, AU143588, |
| | | | | | AA132187, AA346081, AW272217, AA937599, AA768309, |
| | | | | | BG119737, AI269189, AA213390, |
| | | | | | AW470843, BG152444, AA345939, AU119495, AW472911, |
| | | | | | N79590, BF965572, BE927026, |
| | | | | | AW135722, AI476168, AI225142, AW468954, AW662675, |
| | | | | | R98330, BF701626, AA219273, AA894959, |
| | | | | | AW131851, AI953548, AW020315, AI273292, N42771, |
| | | | | | AA483620, AW020778, AU123385, BE789652, |
| | | | | | AA806664, R76355, BF798339, AU143059, C01324, |
| | | | | | AA477442, AA278394, AA360766, AA493588, |
| | | | | | D57433, AA055730, AI263848, BF568115, AA355957, |
| | | | | | C16574, BE768067, BE257278, BE769335, |
| | | | | | AI871532, BG056236, AU157375, C15332, BE768128, |
| | | | | | C15888, AI572258, BE832706, AA127285, |
| | | | | | AA213389, BF568943, AA306589, BE768330, AI419087, |
| | | | | | AW352394, AI301771, AW948844, C16185, |
| | | | | | AW352393, AI086134, BE768255, AA379170, AW150588, |
| | | | | | T05903, AI868436, AW607253, T34681, |
| | | | | | D56966, T05872, AI383207, T83511, AW386700, |
| | | | | | AA360855, AI553717, BE002352, AA749012, |
| | | | | | BE255441, BE407649, AA318574, BF916812, AI417990, |
| | | | | | AA948636, AU126576, D58170, D81687, |
| | | | | | R33934, BE537246, T83365, N56217, BE768115, |
| | | | | | Z28428, AA384012, BF910964, BG036399, |
| | | | | | BE006509, BE328348, C16357, AW136837, D54272, |
| | | | | | AW581573, AA054844, AA343818, BE176576, |
| | | | | | AI240376, BE973789, AA114282, AW891081, AW965974, |
| | | | | | AL045469, AA278975, AA344020, N55736, |
| | | | | | D57510, AA779191, R33042, AA531526, AW891054, |
| | | | | | BG034932, AA641391, AF000364.1, |
| | | | | | AL109936.10, BC001449.1, AL161799.19, Z82022.1, AL137459.1, |
| | | | | | AF219137.1, AB056809.1, |
| | | | | | AL359618.1, AL117432.1, AB062978.1, AB056421.1, AL512746.1, |
| | | | | | AB047904.1, AL050149.1, |
| | | | | | AL133640.1, AL117435.1, AF061943.1, AB055374.1, AB060916.1, |
| | | | | | AB060826.1, AL512750.1, |
| | | | | | AB048919.1, AL137557.1, AK025967.1, AL137648.1, AK027213.1, |
| | | | | | AL133075.1, AF090900.1, |
| | | | | | AL162083.1, AL050116.1, BC004958.1, AL512689.1, AL133560.1, |
| | | | | | BC008485.1, BC003687.1, |
| | | | | | BC006832.1, AK025084.1, BC003548.1, AF090901.1, AL512765.1, |
| | | | | | U39656.1, AL110196.1, |
| | | | | | BC006180.1, AK025632.1, AK026927.1, AF125949.1, AB060912.1, |
| | | | | | AF090934.1, AF090943.1, |
| | | | | | AL049430.1, AB056420.1, AK025312.1, AL512718.1, AL049314.1, |
| | | | | | AL353957.1, AL137550.1, |
| | | | | | AK026542.1, AK024524.1, BC005858.1, AK026741.1, AK027146.1, |
| | | | | | AF056191.1, BC008365.1, |
| | | | | | AL050277.1, AK026504.1, AK026045.1, AF225424.1, AL137271.1, |
| | | | | | AK027164.1, BC006195.1, |
| | | | | | AL162002.1, AK026086.1, AL512684.1, AL080159.1, BC008899.1, |
| | | | | | AK026959.1, AL096744.1, |
| | | | | | BC003122.1, BC006494.1, AK000718.1, BC001967.1, AF091084.1, |
| | | | | | BC008387.1, BC004951.1, |
| | | | | | AL133016.1, AK025254.1, AL137527.1, S78214.1, AK000486.1, |
| | | | | | AL389939.1, AL050024.1, |
| | | | | | AK026480.1, AL122050.1, AF132676.1, AF061836.1, AL137538.1, |
| | | | | | AK025015.1, AK000323.1, |
| | | | | | BC004556.1, AL133565.1, AL122121.1, AB049892.1, Y16645.1, |
| | | | | | AF177336.1, AB060852.1, |
| | | | | | AF090903.1, AB052200.1, AF271350.1, AK000083.1, AK025092.1, |
| | | | | | AL359601.1, AF260566.1, |
| | | | | | AL389982.1, BC006807.1, AK026532.1, AL137463.1, AK026865.1, |
| | | | | | AK026408.1, AF026816.2, |
| | | | | | X72889.1, AL137526.1, AL049347.1, AK027096.1, AK026522.1, |
| | | | | | AL359583.1, AF110640.1, |
| | | | | | Y14314.1, BC008417.1, AF217982.1, AL122093.1, AL389935.1, |
| | | | | | BC007021.1, AK024538.1, |
| | | | | | AK026534.1, AK024588.1, AF106862.1, AB052191.1, AK026583.1, |
| | | | | | AJ242859.1, BC008717.1, |
| | | | | | AK025772.1, S77771.1, AL442082.1, X65873.1, AK026593.1, |
| | | | | | AB055361.1, AL080060.1, |
| | | | | | AB051158.1, X82434.1, AF097996.1, AK026597.1, AK025414.1, |
| | | | | | AF183393.1, AL133557.1, |
| | | | | | AF252872.1, AL133113.1, BC002733.1, AK026462.1, AL080124.1, |
| | | | | | BC008488.1, BC008070.1, |
| | | | | | AL133080.1, AB055370.1, AK025339.1, AB055315.1, AL512733.1, |
| | | | | | AL162006.1, AL049452.1, |
| | | | | | AK025491.1, BC001045.1, Z37987.1, AB055368.1, AK000310.1, |
| | | | | | AF125948.1, AF111112.1, |
| | | | | | AK027116.1, BC004181.1, AF078844.1, AL122110.1, AL359941.1, |
| | | | | | AL512719.1, AB048953.1, |
| | | | | | AB050510.1, AL137560.1, BC005168.1, AK026744.1, AL136844.1, |
| | | | | | AK025209.1, AK027204.1, |
| | | | | | AL117460.1, AB062938.1, AB063084.1, AK025573.1, AL136768.1, |
| | | | | | AL353940.1, AL136586.1, |
| | | | | | U80742.1, AK026551.1, AL050138.1, AL050393.1, AL136805.1, |
| | | | | | AJ012755.1, AF104032.1, |
| | | | | | AK027868.1, AL136893.1, AK026600.1, BC007326.1, AB063070.1, |
| | | | | | BC006164.1, AB063008.1, |
| | | | | | AL122111.1, AK026947.1, AK027200.1, BC003684.1, AF146568.1, |
| | | | | | AB047609.1, AL133606.1, |
| | | | | | AK027193.1, AL136749.1, AK026608.1, AK026592.1, AK000614.1, |
| | | | | | AL136928.1, AL049283.1, |
| | | | | | AL049466.1, BC003682.1, AB060917.1, AL136789.1, BC007680.1, |
| | | | | | AL117457.1, AK026434.1, |
| | | | | | AL050108.1, AL136845.1, BC006201.1, BC002343.1, AL096751.1, |
| | | | | | AB062750.1, AK026452.1, |
| | | | | | X98834.1, AK027113.1, L19437.2, AL359622.1, AL136622.1, |
| | | | | | AB060876.1, AB060893.1, |
| | | | | | AB056427.1. |
| HAPNY94 | 26 | 699770 | 1-728 | 15-742 | BG029349, AW384082, AI653230, AW384103, AW590965, |
| | | | | | AI952047, AW474522, BF514114, |
| | | | | | AI952951, AI138532, AI199860, AW474480, AI655852, |
| | | | | | AI656352, AV727834, AI424794, AA909918, |
| | | | | | AI377297, AA632416, AA205078, BG150070, BE243783, |
| | | | | | AA709293, AW016441, AA906134, |
| | | | | | AI350684, AI825691, AW770135, AA971473, U51144, |
| | | | | | BE867482, AA770535, AA873641, BE160147, |
| | | | | | BF772564, BE184408, BC002538.1, AL133351.33. |
| HAPOM49 | 27 | 769555 | 1-1991 | 15-2005 | AL520731, AL520732, BE271092, BE271295, BF111901, |
| | | | | | AV650049, BF686278, BE840511, BF111645, |
| | | | | | AI809801, AW168904, AI809806, AW103024, AA933973, |
| | | | | | AI744944, AI588991, AI033486, AI096548, |
| | | | | | AA662523, AW468813, AI950317, AI279302, AI096696, |
| | | | | | BF239172, AW662564, AA417671, AI189300, |
| | | | | | AI753808, AA235373, AW960081, AI095057, W86920, |
| | | | | | AW189373, AI361321, BF061913, AI366754, |
| | | | | | AI218487, AI824959, AI348339, AI032926, AV659024, |
| | | | | | AA889791, BE243641, AA626261, AI338100, |
| | | | | | AA417558, W24077, AW974720, N72014, AA894657, |
| | | | | | N59290, R01247, AA235784, BE929365, |
| | | | | | BE929364, BE244396, AI275184, AI810247, W24089, |
| | | | | | R36924, AA356938, N91904, AA508411, |
| | | | | | AA649828, N91912, N99466, Z24931, H68902, |
| | | | | | BE782571, BF840140, AC004067.1, AF332892.1, |
| | | | | | AF306567.1. |
| HAPUC89 | 28 | 834358 | 1-1139 | 15-1153 | AL525296, AL522464, AL521417, AL533389, AL521416, |
| | | | | | AL524355, AL526414, AL526331, |
| | | | | | AL530863, AL524354, BE311955, BF725110, AI264358, |
| | | | | | AI669655, BF036463, BE312775, BF984883, |
| | | | | | AA477724, BF314033, AL530380, BE937625, AL526176, |
| | | | | | AL523655, AL530864, AW139040, |
| | | | | | AL520874, AL526455, AI126122, AI823620, AA312871, |
| | | | | | AL530093, AI857695, BF315809, BE256735, |
| | | | | | AW440406, AW271360, AL523656, AI200833, AI024780, |
| | | | | | AW136150, AW134590, AL522465, |
| | | | | | AA496351, BE924996, BF476679, AA292746, T55664, |
| | | | | | AI367466, AA496400, AI274000, AI283242, |
| | | | | | AI801876, AW068036, AA583620, AA477725, AA829681, |
| | | | | | BE797269, AW136110, BF822582, |
| | | | | | AI554612, AI922256, AA758054, AL533433, AW591703, |
| | | | | | BE735184, BF344330, AA296469, AI017151, |
| | | | | | AA293719, AA427485, BE562900, AW300774, AW889471, |
| | | | | | AI863281, AI424169, AI291789, |
| | | | | | BF445650, AL525339, AI670976, H01676, N55872, |
| | | | | | AW952132, BE242458, H01677, AA364430, |
| | | | | | BE735989, AA318820, AA508789, BF311298, BE397771, |
| | | | | | AA301453, BE785480, BE893629, AI248018, |
| | | | | | BF032466, BF342490, AI540614, BE264109, BE926389, |
| | | | | | BF309156, AA232553, BG255921, BE392626, |
| | | | | | BE261742, AI085402, BE206819, BE276164, BF312350, |
| | | | | | BF206486, BF763257, BG252820, AA642901, |
| | | | | | AW188803, AI758262, AA908888, BF207123, AW137361, |
| | | | | | BE258582, BE384894, AI093805, |
| | | | | | BG257985, AI751518, BF810986, BF337632, BF796886, |
| | | | | | BE397750, BE504399, F19099, AA610640, |
| | | | | | BF794720, BG104721, AI581186, BC002494.1, AC004150.8. |
| HATBR65 | 29 | 635514 | 1-798 | 15-812 | AW754098, AV747079, AW964560, BF827304, AI697254, |
| | | | | | AA826321, AA663880, BF924786, |
| | | | | | AA772037, AV725414, AA826164, AA663006, AA826322, |
| | | | | | BE062047, AA835931, AA319870, R95053, |
| | | | | | AV760830, BF918713, BF959165, AI053538, BF930635, |
| | | | | | BE828744, AA078591, AF139781, AA491430, |
| | | | | | AA078183, AW393403, W74390, AW578861, AW393400, |
| | | | | | AA320812, BF840307, AA078213, |
| | | | | | AW752269, BF757569, AA077448, BG004304, AW793003, |
| | | | | | AA047825, AA001509, AA076683, |
| | | | | | AW857010, BE183669, BE183617, BE699552, AV720211, |
| | | | | | AW973541, BE932909, AI254770, |
| | | | | | AI284543, AI251203, AI249853, AV743864, AI251284, |
| | | | | | AW276678, AW966385, BF952670, BE707812, |
| | | | | | AI251034, AI250552, AW970571, AW869794, BE139139, |
| | | | | | AA609826, AW303098, AA552586, |
| | | | | | BF952311, AV719632, AV718487, AW905386, BE138387, |
| | | | | | AV720104, BF952747, AA015737, |
| | | | | | AW975623, BE129140, AA076784, AA604865, BG222875, |
| | | | | | AV720729, AA504818, AW905269, |
| | | | | | AV754716, AW969831, AA501867, BE042006, BF589824, |
| | | | | | W72324, BF691892, AI954192, AA610381, |
| | | | | | AA503018, AA747757, H04977, AA904211, AI912401, |
| | | | | | AI279417, BE968744, AC004084.1, |
| | | | | | AF030453.1, AC005088.2, AC004951.5, AC018720.5, AC007078.3, |
| | | | | | AC004980.4, AC007000.2, |
| | | | | | AC006480.3, AC004878.2, AC006014.2, AC007003.4, AC005488.2, |
| | | | | | AC005098.2, AC004867.5, |
| | | | | | AC004166.12, AK021477.1, AC005071.2, AC005236.4, AP000350.1, |
| | | | | | Z95115.1, AC073462.8, |
| | | | | | AC007792.1, X51956.1, Z95331.2, AC022382.3, AC087071.2, |
| | | | | | AC005291.1, AL035495.13, |
| | | | | | AL162424.20, AC002107.1, AC002106.1, Z98884.11, AF168787.1, |
| | | | | | AL157791.4, Z82215.1, |
| | | | | | AF172081.1, AC008116.8, AL008729.1, AC018809.4, AC079141.7, |
| | | | | | AC011811.42, AC006111.3, |
| | | | | | AC020558.4, AC007766.1, AL162426.20, AL139317.5, AL390838.26, |
| | | | | | AL031005.1, |
| | | | | | AL161779.32, AC004477.1, AC008392.6, AL162615.13, AC009509.7, |
| | | | | | AC003690.1, U95740.1, |
| | | | | | AL034372.33, AF196970.1, AF253417.1, AC000062.1, AL109825.23, |
| | | | | | AC024028.10, |
| | | | | | AL034553.12, AC003030.1, AL591398.2, AC005899.1, AL034400.2, |
| | | | | | AC073492.18, |
| | | | | | AC011473.4, AC005772.1, AL139316.5, AC006487.8, AC011472.7, |
| | | | | | AP001929.4, AP000963.2, |
| | | | | | AC072061.8, Z98051.6, AC005327.1, AC007225.2, AL109804.41, |
| | | | | | AC006057.5, AP001711.1, |
| | | | | | AL136984.20, AC009506.5, AL139100.9, AC008397.7, AC007199.1, |
| | | | | | AL137162.25, AF190464.1, |
| | | | | | AC009247.12, AC025430.5, AC005261.1, AC006357.5, AC005325.1, |
| | | | | | AL121880.21, |
| | | | | | AC008395.6, AP000314.1, AL353715.21, AC025166.7, AL049779.6, |
| | | | | | AL355336.15, AC011479.6, |
| | | | | | AC011495.6, AL359644.10, AC020904.6, AC004706.1, Z98044.13, |
| | | | | | AL049874.3, AC007201.1, |
| | | | | | AL161757.4, AC007130.2, AL139415.10, AC022384.4, AC008738.6, |
| | | | | | Z95114.19, AC090841.1, |
| | | | | | AC005378.2, AC022001.3, AL031848.11, AC018494.6, AL445435.11, |
| | | | | | AC002128.1, |
| | | | | | AC018811.4, AC007685.2, AL121601.13, AC004805.1, AL353777.18, |
| | | | | | AL359397.3, |
| | | | | | AC078818.19, AC007679.4, AP001781.4, AP000563.1, AP000194.1, |
| | | | | | AC007956.5, AC020633.3, |
| | | | | | AL021155.1, AC009131.6, AL359236.4, AL391839.9, AL391259.15, |
| | | | | | AL096701.14, |
| | | | | | AC008079.23, AC039056.7, AC005256.2, AL353812.13, AC004263.1, |
| | | | | | AL023553.5, |
| | | | | | AC008551.5, AC005932.1, AC079602.15, AP000133.1, AP000211.1, |
| | | | | | AJ011930.1, AL356354.10, |
| | | | | | AL163300.2, AC007066.4, AC006441.13, AC005586.2, AD000684.1, |
| | | | | | AC000134.14, |
| | | | | | AL021878.1, AC002369.1, AL032821.2, AC009510.9, AL096791.12, |
| | | | | | AC009161.12, Z82208.1, |
| | | | | | AC008641.6, AC005056.2, AL049869.6, AC023105.7, AL355312.24, |
| | | | | | AP001718.1, AL136179.15, |
| | | | | | AL078461.38, AF279660.2, AC004873.3, AC010205.5, AL353692.14, |
| | | | | | AC013726.7, AP000497.1, |
| | | | | | AC010530.7, AL133320.8, AD000864.1, Z82214.23, AL356805.5, |
| | | | | | AP000471.2, AB045360.1, |
| | | | | | AF001552.1, AL359382.23, AL450465.12, AL354815.10, AC005933.1, |
| | | | | | AL121754.18, |
| | | | | | AC018695.6, AC010618.7, AF186190.3, AE006467.1, AC002126.1, |
| | | | | | AL035681.13, AL354866.10, |
| | | | | | AC009238.4, AC007240.2, AC020946.4, AC013467.8, AC011449.6, |
| | | | | | AC004522.1, AC020945.6, |
| | | | | | AC010605.4, AL035086.12, AL049843.18, AC005231.2, AL136228.8, |
| | | | | | AL033526.24, |
| | | | | | AP002456.3, AC008080.1, AF181668.1, AC005800.1, AC011455.6, |
| | | | | | AC013355.7. |
| HAUAI83 | 30 | 639009 | 1-896 | 15-910 | BE439675, BF984328, BF978147, AW955502, BF337207, |
| | | | | | BE272543, AV757236, BE903592, |
| | | | | | BF212880, AW405217, BE743902, AI991315, AV701663, |
| | | | | | BE270100, BF681301, BG178791, |
| | | | | | BE222645, BG167626, BF132414, AW069149, BF238307, |
| | | | | | AV736544, BG255905, BF698492, |
| | | | | | BF130460, BF102497, AV745093, BE543668, AI493727, |
| | | | | | BE254068, AA934591, N24442, AI147316, |
| | | | | | BF680700, AV705947, BE734398, BG231583, BE256074, |
| | | | | | AV754408, AW014782, AI198642, |
| | | | | | BE646408, AA889969, AI709288, AW135010, AA877730, |
| | | | | | AI720901, AA496681, AA995328, |
| | | | | | AI032868, AW579254, AI186312, AI969715, AI660672, |
| | | | | | N23673, AA420567, AA427691, AI188938, |
| | | | | | AA471213, BG117664, BF102532, AI191317, AI332586, |
| | | | | | AI219152, AW000829, AI470155, AA843102, |
| | | | | | AI125390, BE312355, AW182893, AI141484, H93124, |
| | | | | | AW000718, AI268069, AA815421, AA708211, |
| | | | | | AA129884, AI023128, AI147588, AV724436, AA159902, |
| | | | | | AI129253, AA290635, AV706639, AI127280, |
| | | | | | N58266, AA315771, AI673417, AI587141, AI186000, |
| | | | | | AI142324, AI128437, AA723220, AI335350, |
| | | | | | BF687940, AA552070, AI087415, AA995933, AW300769, |
| | | | | | AA862543, AW008043, R68241, BE349483, |
| | | | | | AI241459, AI355685, AW304225, AW083014, AI277068, |
| | | | | | AI038096, AI160884, AA774420, BE407927, |
| | | | | | AA810159, W37128, W04866, AI828898, AI093015, |
| | | | | | AA732834, AV707544, AI934627, AA026633, |
| | | | | | W01678, H84951, AI279658, BF665006, AA419151, |
| | | | | | AA844949, AI096712, N71609, AV735174, |
| | | | | | N69652, AA159798, AI969153, AV729015, AA149944, |
| | | | | | N95063, AI798245, AV736793, AA771923, |
| | | | | | H20023, R99610, H50207, AA653091, N70496, |
| | | | | | AW104010, H40779, N33986, D55334, AV743438, |
| | | | | | AW130386, BF977248, AI125700, BE091971, AA572869, |
| | | | | | W00449, AI744165, AA157561, AA531221, |
| | | | | | AI275921, AA969778, H95780, N92248, AI159958, |
| | | | | | N38815, H20143, AI680770, AA305332, N77862, |
| | | | | | AV738026, N72206, AA037790, AI752109, AV743648, |
| | | | | | AA937128, AA962124, AA478395, AV741494, |
| | | | | | AV740102, H19070, R71518, H18782, R94908, |
| | | | | | BE621803, R77435, H99652, AA694460, AA641831, |
| | | | | | H21165, AW511932, AI184349, W38900, AA844297, |
| | | | | | H46188, W58208, W40195, R71470, N94261, |
| | | | | | T31343, BE620993, R70469, BE909620, N25251, |
| | | | | | AI752110, AV741554, AA165011, AA037789, |
| | | | | | H01343, AA643896, R77524, H23656, R70556, |
| | | | | | T30654, W37143, AA326924, C01763, R91937, |
| | | | | | W32075, H60231, R92265, H69010, H67121, |
| | | | | | H71491, H18688, R09629, H38970, H27857, AA558120, |
| | | | | | R94992, R09517, H75393, R99715, H23612, |
| | | | | | AA326929, AA026672, BF436567, H01135, N54428, |
| | | | | | AA186949, T32463, H59520, AA339137, H39170, |
| | | | | | AI709334, R86746, N33887, R68534, AA305400, |
| | | | | | N58289, AI351248, AA410643, AC010422.7, AF151898.1, |
| | | | | | AF059620.1, BC001192.1, T52716, |
| | | | | | T61025, T61577, R26656, R79694, H03303, |
| | | | | | H03402, H18972, H22368, R87112, H60187, H60393, |
| | | | | | H81427, H84495, N71651, W31583, AA164972, |
| | | | | | AA188345, AA419096. |
| HBAMB15 | 31 | 671835 | 1-807 | 15-821 | W27833, AI860764, AA809619, BF432929, AA768248, |
| | | | | | AI370876, AV748724, AI291737, H96013, |
| | | | | | AW051697, AI633038, AI784315, BE546233, BF980899, |
| | | | | | BF977483, AL138479.4, AL132855.4, |
| | | | | | AL121755.23. |
| HBGNU56 | 33 | 1352412 | 1-850 | 15-864 | AW954217, BE875979, BG025158, BF529722, BE395207, |
| | | | | | BE734057, BE789549, BE873075, |
| | | | | | BE785505, BE614806, BE738333, BE614883, BE253565, |
| | | | | | BF340317, BF737302, AA044211, BF792671, |
| | | | | | AW796084, AW238972, BF738993, BG012029, BF812968, |
| | | | | | BE876237, AW406916, BF901660, |
| | | | | | AI342703, AA075901, H25630, BE810793, BE183450, |
| | | | | | H43485, AA296837, R95168, BF809994, |
| | | | | | BF868942, AL532494, W95348, H80718, BF804848, |
| | | | | | AA287470, AA806231, AL532493, AA298795, |
| | | | | | BF997411, AA296696, AA296826, BF082160, AA218811, |
| | | | | | AA296869, BF331433, BF829581, |
| | | | | | AA034079, AV743953, AW802996, H73675, R55519, |
| | | | | | BE140100, BF056207, AI819836, BE737872, |
| | | | | | BF446055, AA465105, BE396147, AA044081, AA583464, |
| | | | | | AI582284, AA983595, BE775061, C00212, |
| | | | | | BF771777, BF799156, BF895320, BF931829, AI537196, |
| | | | | | BF771828, AA523623, R39644, AI521467, |
| | | | | | AI952620, BE828356, AA187096, H42497, AA297863, |
| | | | | | BF763569, AW338141, BF736987, BF248485, |
| | | | | | AI346295, AI424071, AW512207, BF905334, AI066489, |
| | | | | | AI028038, AA699982, N86960, AI358167, |
| | | | | | T10507, AI683820, BF245896, BE904822, BF978464, |
| | | | | | BF811185, AA622655, BF814100, AA304509, |
| | | | | | AA595646, AA912088, AA287334, AA643965, BF747982, |
| | | | | | W95391, BE043918, BF807379, AI279829, |
| | | | | | AA722634, AI817892, AA187305, H80719, AA485829, |
| | | | | | R55520, BE671577, BF750444, AI637718, |
| | | | | | BF674579, AA873526, AW103333, AI650465, AA531049, |
| | | | | | AA658172, BG057590, AA583458, |
| | | | | | AV743642, AV739884, AV742260, AV743114, AV738121, |
| | | | | | AV736224, AV744272, AV741543, |
| | | | | | AV738375, AV738262, AV743004, AV739415, AV736083, |
| | | | | | AV737550, AV737002, AV741197, |
| | | | | | AV737715, AV742899, AV741000, AL037348, AV737101, |
| | | | | | AV739156, AV739895, AV701296, |
| | | | | | AV743288, AV740805, AV740787, AV737726, AV737727, |
| | | | | | AV744332, AV739871, AV740443, |
| | | | | | AV742357, AV743197, AC002390.1, AF177940.1, AL080096.1. |
| HBIAE26 | 34 | 514418 | 1-1024 | 15-1038 | AW237905, AI635440, AL079734, AV729929, H73550, |
| | | | | | AI669421, BE092488, AC004076.1, |
| | | | | | AY030284.1, AL139353.3, AC008569.6, AC011479.6, AL031659.9, |
| | | | | | AC083865.2, AL353807.18, |
| | | | | | AE006464.1, AL136979.16, AL163032.3, AC019097.5, AC015651.18, |
| | | | | | Z93023.1, AC011484.4, |
| | | | | | AC013449.8, AC005015.2, AC006120.1, AC084865.2, AC022116.5, |
| | | | | | AL512449.6, AL109797.18, |
| | | | | | AC005736.1, AC006008.2, AL022336.1, AC006329.5, AC002302.1, |
| | | | | | AL357515.26, |
| | | | | | AL035669.43, AF288742.1, AC005522.2, AC005840.2, AC021016.4, |
| | | | | | AC078962.30, AP002851.2, |
| | | | | | AL138787.11, AP001695.1, AL160269.14, AC005512.1, AL034420.16, |
| | | | | | AL354932.26, |
| | | | | | AC005088.2, AC011500.7, AC008666.5, AC010404.5, AC000353.27, |
| | | | | | AC011469.6, |
| | | | | | AL139384.16, U91321.1, AC005355.1, AL024498.12, AC008755.6, |
| | | | | | AC020552.4, AC008641.6, |
| | | | | | AL356970.21, Z97876.1, AC005046.3, AL022326.1, AC007388.3, |
| | | | | | AL451075.15, AL390374.16, |
| | | | | | AC026431.3, AC011497.6, AC009120.8, AC010267.6, AL158207.15, |
| | | | | | AL590762.1, AL137229.4, |
| | | | | | AL135978.4, AL133454.6, AC008901.5, AC008752.6, AC002045.1, |
| | | | | | AC006211.1, AP002982.2, |
| | | | | | AC002301.1, AC004106.1, AC004089.25, AP001752.1, AL138733.15, |
| | | | | | AC006449.19, |
| | | | | | AL121992.24, AC015550.18, AL035420.15, AC067941.7, AC004900.2, |
| | | | | | AC008786.6, |
| | | | | | AL109743.4, AL121578.1, AC018639.8, AP002812.3, AL033383.26, |
| | | | | | AC010913.9, AC024561.4, |
| | | | | | AC010618.7, AC020916.7, AL157877.11, AC018758.2, AL035071.17, |
| | | | | | AC002470.17, |
| | | | | | AC004922.2, AL035422.12, AC006597.2, AC011236.8, AC006480.3, |
| | | | | | AC007597.3, |
| | | | | | AL357315.14, AC000360.35, AL353135.32, AC022217.5, AC005531.1, |
| | | | | | AC008946.6, |
| | | | | | AC008264.10, AL049539.21, AC008655.6, AL138784.30, AC006538.1, |
| | | | | | AF129075.2, |
| | | | | | AL356257.14, AL034417.14, AC008440.8, AC005920.1, AC009131.6, |
| | | | | | AL121826.11, |
| | | | | | AC005480.3, AC083871.2, AL139385.12, AC007683.5, AC011452.6, |
| | | | | | AC008155.9, AP000555.1, |
| | | | | | AC009470.4, AC005077.5, AF064861.1, AL139809.16, AB003151.1, |
| | | | | | AL136105.9, AL049776.3, |
| | | | | | AC008745.6, AL031774.1. |
| HBINS58 | 35 | 1352386 | 1-829 | 15-843 | AI827239, AW104045, AL536345, AL096774.9. |
| HBJFU48 | 36 | 460392 | 1-835 | 15-849 | BF674706, AA657543, AV757289, BE139139, AI250552, |
| | | | | | AI251284, AI251203, AI284543, AI251034, |
| | | | | | AW674277, AI254770, AW303098, AA582073, AI249853, |
| | | | | | AC005696.1, AF045555.1, AC090514.1, |
| | | | | | AF243527.1, AP001725.1, U91318.1, AL121897.32, AP003357.2, |
| | | | | | AC008155.9, AC005081.3, |
| | | | | | AL132838.4, AC011470.5, AP000692.1, AL132640.4, AL109976.23, |
| | | | | | AL121992.24, AL135928.6, |
| | | | | | AL033529.25, AL353807.18, AC020916.7, AL138849.12, AC011247.10, |
| | | | | | AL158830.17, |
| | | | | | AP000501.1, AL008637.1, AC006270.1, AC011464.5, U95742.1, |
| | | | | | AC022384.4, AC011555.5, |
| | | | | | AL049795.20, AL033383.26, AC005921.3, AC012170.6, AC004922.2, |
| | | | | | AC007934.7, |
| | | | | | AC018828.3, AL121653.2, Z82215.1, AC022383.3, AL049636.22, |
| | | | | | AC007216.2, AC005971.5, |
| | | | | | AC005058.1, AC010431.7, AL135783.6, AC044797.5, AP000355.1, |
| | | | | | AL121928.13, AE006462.1, |
| | | | | | AL590682.9, AL451083.5, AL162724.16, AC004906.3, AC006312.8, |
| | | | | | AL359272.9, AP001666.1, |
| | | | | | AP001716.1, AF111169.2. |
| HBJLC01 | 37 | 638410 | 1-858 | 15-872 | AW962384, AW956292, AA631830, AV708590, AW964544, |
| | | | | | AV709418, AI814702, AV729132, |
| | | | | | AV726091, AA652816, AV657453, AW956077, AW962908, |
| | | | | | AW966634, AW963349, AV708167, |
| | | | | | AV703597, AV727065, AV703388, AV703232, AW961593, |
| | | | | | AV702425, AW961606, AW950632, |
| | | | | | AW963756, AW963609, AV701873, AW959734, AW962444, |
| | | | | | AV707331, AI525316, AV703761, |
| | | | | | AV729517, AV726754, AV707276, AW961313, AW963348, |
| | | | | | AV705525, AW962942, AW963583, |
| | | | | | AW966270, AV708720, H60864, AW950748, AC004033.3, |
| | | | | | AC007050.25, AC008745.6, |
| | | | | | AC005500.2, AP000502.1, Z94801.1, AF019413.1, AC005261.1, |
| | | | | | AC005332.1, AC025588.1, |
| | | | | | AC006372.2, AC008265.15, AL590763.1, AL359235.3, AP000789.4, |
| | | | | | AC005476.4, AC079602.15, |
| | | | | | AC009789.21, AC018638.5, AC024952.4, AL022318.2. |
| HBNAW17 | 38 | 526797 | 1-587 | 15-601 | AA713518, AA807610, AW104604, AA830415, AW975518, |
| | | | | | AL138824.19. |
| HCE2F54 | 39 | 634016 | 1-1262 | 15-1276 | AL530657, AL534642, AL519887, AL519439, BE257752, |
| | | | | | AA769913, AI609266, BE674973, AI652143, |
| | | | | | BG057242, BE046399, AI669608, AU157638, BF347064, |
| | | | | | BE046435, AI571552, AA406626, AI634414, |
| | | | | | AW731848, BE245626, AI372990, AW473891, AU153165, |
| | | | | | AA969877, AI458122, AA402109, |
| | | | | | AU157487, AI815017, AA936365, AA481847, AI052565, |
| | | | | | AA704608, AI860561, BE736308, AI591232, |
| | | | | | AA425187, BF685966, AA479747, AI922541, AA889587, |
| | | | | | AA992245, R47377, AV694506, AA707462, |
| | | | | | AA283778, BF589042, AI767815, AW439290, AI354234, |
| | | | | | AW630387, R82068, BF829195, BG152634, |
| | | | | | AA229272, BE246763, AI745410, AW074728, AI867440, |
| | | | | | AA405028, AI652744, AI799388, AW732540, |
| | | | | | AA724063, AI249812, R43967, BE247615, AA229721, |
| | | | | | AA290883, AA477093, BF847615, AW117313, |
| | | | | | AA425298, AW804421, AV661367, AW627358, AA456146, |
| | | | | | W45494, R82878, R82020, F35061, |
| | | | | | H01485, AW014040, F25139, AA339640, AI961334, |
| | | | | | AA478233, AA362857, AA326205, BE244646, |
| | | | | | AA229827, AA377429, AI186501, BG008599, BE242784, |
| | | | | | T32225, AV686564, AA688260, AI085847, |
| | | | | | AV686569, BE157547, AA860204, R08559, F09429, |
| | | | | | AA405272, BF845336, BF380796, BF380795, |
| | | | | | AI860044, AA883556, AA032260, AA332516, AA402982, |
| | | | | | AA332325, BE157532, AA336006, Z39018, |
| | | | | | AI695855, AI589935, AI583010, AI954634, BF841145, |
| | | | | | AW469249, F04759, AA032193, F04962, |
| | | | | | AI524382, BF922668, BE157535, H01586, AI298047, |
| | | | | | T89862, AL530658, BF883965, BF374266, |
| | | | | | M78413, BF883968, AW197535, AW952615, BF847600, |
| | | | | | AW007397, BE157466, AI907687, AI632570, |
| | | | | | AL519888, AK023173.1, BC007642.1, BC007864.1. |
| HCE3G69 | 40 | 728432 | 1-2070 | 15-2084 | BE740754, BF339727, BE740538, BE277589, BE382940, |
| | | | | | BE618822, BE793142, BE390135, BF530091, |
| | | | | | AW969581, BF315345, BF340007, BG164152, BE618316, |
| | | | | | BE277504, BE740158, BE542020, |
| | | | | | BF527796, BF796337, BF310510, BE409091, BE545069, |
| | | | | | BE312476, AI979049, BF314374, AI828148, |
| | | | | | BF528364, BF341988, AA987262, AA789210, BE783336, |
| | | | | | AA552222, BE042994, BE408361, |
| | | | | | AA542834, BE262213, BF724352, BG170449, AA399248, |
| | | | | | AI399975, AA682879, AA709002, |
| | | | | | AA628073, AA523036, AI281261, AI749652, AI148325, |
| | | | | | BE297932, AI347619, AI206709, AI857651, |
| | | | | | AI304965, R77325, AI523697, AA349818, T16002, |
| | | | | | H56978, N95160, AA351179, BF736456, BF919187, |
| | | | | | W16789, R61061, AA994296, BE872104, AW131936, |
| | | | | | T77786, BF805555, R42239, AI001897, R49103, |
| | | | | | H27917, AI216183, BF435415, AA349337, AA293132, |
| | | | | | AA349338, H47705, BF690107, BE909738, |
| | | | | | BE831416, T87999, R77274, AA017080, AA293765, |
| | | | | | H47615, W21536, R64334, H56891, BF813356, |
| | | | | | BF957635, BE827070, AI560786, R64335, T77787, |
| | | | | | AW380761, AI027520, AW380835, AI870267, |
| | | | | | AI263580, BE563729, AA324593, AA588228, AW955408, |
| | | | | | AI277032, R18259, AI566653, T33783, |
| | | | | | AW883586, D53543, BG105324, AW452975, R60940, |
| | | | | | H41337, R36021, T32921, BF895461, AI360103, |
| | | | | | AW380828, BE256741, AA057061, AI564056, AW327298, |
| | | | | | AI244916, W35216, BE262875, AL040896, |
| | | | | | BE501695, BE351024, BF058407, BE263311, T15786, |
| | | | | | AA812926, AA830661, BE693588, AI797886, |
| | | | | | BF314562, AA299346, AW451523, BF337822, AI520932, |
| | | | | | D80870, AA333807, AA058540, AW363994, |
| | | | | | AW604788, AW820702, AW820474, BF848412, BF312802, |
| | | | | | BE171868, AW604793, AW273608, |
| | | | | | AA610114, AA865732, AW363958, AA524542, AI089686, |
| | | | | | AA359625, W23626, D20577, AI150519, |
| | | | | | W31778, AI150517, AW997867, AV704757, AV706824, |
| | | | | | AV705873, BC002420.1, AL136758.1. |
| HCE5F43 | 41 | 612796 | 1-1751 | 15-1765 | AL525531, BG034956, BE858832, BE897817, BF510434, |
| | | | | | BG253874, AI656560, AI628821, BF215392, |
| | | | | | BF244940, AI097077, BG235906, AW954960, AU160122, |
| | | | | | BF245375, BF977858, AU155177, AI470134, |
| | | | | | BF224262, AU150756, AU149864, AW473477, AI955730, |
| | | | | | BF248416, BF448271, BF154789, AI378490, |
| | | | | | AI800985, AW069497, AI034459, AA156289, AI073518, |
| | | | | | AI697128, BF030327, AU155857, AA233239, |
| | | | | | BF102934, AU156440, AI573091, AA135491, BE222305, |
| | | | | | N47760, AA447203, BF086535, AI160238, |
| | | | | | N99672, AU154967, AI963320, AA234550, BF574918, |
| | | | | | BE930107, AI799196, BF241316, BE928494, |
| | | | | | AA256954, BF084221, BF084272, N34505, BF086530, |
| | | | | | AW362473, AA046377, AA251743, AW362472, |
| | | | | | N79724, BF084201, AV720349, N42280, BF084190, |
| | | | | | AA251841, AA256955, BF086505, BF086503, |
| | | | | | N71937, AI167179, AA235408, AA704119, R62459, |
| | | | | | AA568672, BE928500, AA773818, AA256646, |
| | | | | | BF094389, AA112337, BF086529, R25715, AA417904, |
| | | | | | AA256645, AA320096, AA236661, AI525894, |
| | | | | | BE961214, BF758245, N62776, BF185469, BF511940, |
| | | | | | AA233163, BF084203, N71943, BF086500, |
| | | | | | D61858, AW188824, AI563986, BF695980, AL525580, |
| | | | | | BF086533, AI611807, BF086496, AU136037, |
| | | | | | BF114811, BE536773, AK023459.1, AF063600.1, AB056410.1, |
| | | | | | AB050431.1. |
| HCEFB80 | 42 | 1143407 | 1-2480 | 15-2494 | BF343021, BF339312, BF341481, BF967606, BF344530, |
| | | | | | BF344213, BF513319, AI393526, BE857064, |
| | | | | | AW016800, AI937454, AI370995, AW170034, AA416907, |
| | | | | | AW044650, N75664, BF341415, AW960857, |
| | | | | | BG222497, AA703765, BE855450, AU146334, AA703342, |
| | | | | | N64813, T23840, AA446784, AA228781, |
| | | | | | M86149, T08275, AA386225, AA417008, AI671567, |
| | | | | | T15689, AW128975, AA432098, H83023, |
| | | | | | M85314, AI277779, BG222958, BF923571, M79106, |
| | | | | | BG152559, R13095, R11764, R21361, BF921573, |
| | | | | | F05369, T28040, T10247, AA323697, AI361427, |
| | | | | | AW235399, AI352392, T10246, R37689, AW594074, |
| | | | | | R40527, H82804, N59328, BF894586, R46460, |
| | | | | | T15861, BE672078, C14288, D25217.2, AF319633.1, |
| | | | | | AL022327.17. |
| HCENK38 | 43 | 658737 | 1-1495 | 15-1509 | BG178033, BE896063, AV722833, BE907276, BE277857, |
| | | | | | BF952019, AA521308, AW182868, |
| | | | | | AA908959, AI628880, AW173363, AW665845, BE870003, |
| | | | | | AW631238, AI151418, BF996707, |
| | | | | | AI818267, BG180581, AI653663, AA001203, BE150445, |
| | | | | | R78710, AA130178, W03542, AA746655, |
| | | | | | AI828924, AA001202, AI961323, BE277870, AI093113, |
| | | | | | AI377976, AI951984, AI635625, AI624029, |
| | | | | | AI418242, AW088095, AI346936, W92652, AA130170, |
| | | | | | AA024605, W60401, N53543, AI207798, |
| | | | | | AA969140, AV706224, AA206833, AA862855, AA883077, |
| | | | | | AW173095, AW467519, BF830518, |
| | | | | | AI890288, AW952261, AA676671, R76291, AA641764, |
| | | | | | W60310, AI536758, AA742467, W92685, |
| | | | | | BF830522, C01747, BF029590, AW273508, W72474, |
| | | | | | AL047508, AI863984, W46673, AA928559, |
| | | | | | H97873, W46482, AA969604, T17266, W92828, |
| | | | | | W94587, BF963436, AA024606, AA973624, R61420, |
| | | | | | BF107415, AI932612, W76228, N72501, BE147741, |
| | | | | | AA160170, AI247642, AI499771, AW582120, |
| | | | | | N92375, AI803849, C04881, AW192182, N67695, |
| | | | | | R76925, AV728500, BF906742, AA641806, |
| | | | | | AW601191, BG104607, H00789, T31087, R61378, |
| | | | | | BE706416, AL047509, R78711, R76567, AA564390, |
| | | | | | AA992073, C15162, AI187944, AW779277, H39236, |
| | | | | | AA812071, W61163, H85007, AA733042, |
| | | | | | W61229, AI016971, H81599, H97053, R78466, |
| | | | | | H86612, H85630, AV713546, H90060, H86032, R78534, |
| | | | | | AW952259, AW889353, AA021401, AI540906, W24617, |
| | | | | | R62435, AA714924, R84855, H00689, |
| | | | | | H81598, AA918680, BE903841, T08911, BF834059, |
| | | | | | AA501896, BG106391, R40305, H86526, H85633, |
| | | | | | AA021275, R21120, H85004, AA774992, AI834279, |
| | | | | | AW970014, BE140906, N56017, AA573996, |
| | | | | | AI300746, R13223, Z43839, AI834298, AA094627, |
| | | | | | R85725, AA600097, AI475228, AI834286, |
| | | | | | AW380821, H85894, AA573651, BE843503, T32504, |
| | | | | | AA010588, AW380818, BE881856, AI879932, |
| | | | | | AA992769, D55263, AA829059, AW770059. |
| HCEWE20 | 44 | 543370 | 1-871 | 15-885 | T51653, AW168798, BG059728, AW151307, AA189081, |
| | | | | | AL133942, AI924175, AI610776, AI034217, |
| | | | | | AI479035, BE165748, AI811494, AW090210, AA346162, |
| | | | | | AW167452, AI687804, AI749571, AA470572, |
| | | | | | AW089655, AI197934, AI827133, AU144339, N64574, |
| | | | | | AA470493, AI697247, AI937684, N76274, |
| | | | | | AI984510, AL047920, AA223830, AA493998, BE176566, |
| | | | | | AV730063, T62931, BE148908, AA876415, |
| | | | | | AI801377, AW589501, AA085707, AW177317, AI439860, |
| | | | | | AI813517, AA581340, AI858607, |
| | | | | | AA099491, AA613244, AI887321, AA643785, AA633390, |
| | | | | | AU143906, AV719347, AI362951, W58428, |
| | | | | | AU146966, AA847621, AI564253, AI921101, AL041417, |
| | | | | | AA643823, AI567544, AI733077, AW177120, |
| | | | | | AI561208, AI264673, BE158597, AU145674, AA130536, |
| | | | | | AA694579, N74502, N54295, AW440317, |
| | | | | | AF063514, AU119100, AA873103, AW177237, AA160519, |
| | | | | | AA197059, AW177231, AW177264, |
| | | | | | AA598786, W49501, AA911409, N26540, BE264670, |
| | | | | | AL036881, AU146974, AA493751, AW994225, |
| | | | | | C17730, AA724159, AU145383, AA157033, AA041332, |
| | | | | | AA166854, H96719, AA055654, H65500, |
| | | | | | AA219480, AU148220, AI935333, AL523955, AI132962, |
| | | | | | AW084901, N48690, AI862874, D29455, |
| | | | | | AA598990, BE044603, AF074627, AV730577, BG235936, |
| | | | | | AA878800, R94112, AW275729, AI376984, |
| | | | | | AI951835, AA101456, AA503213, AW440351, AI735074, |
| | | | | | AW177266, BE904846, AA846188, |
| | | | | | AW177226, BE152426, AA493735, AA593081, AW615437, |
| | | | | | AI538654, AA404968, AW813744, |
| | | | | | AA669580, F03370, AA350922, AA356989, AI421079, |
| | | | | | AV728282, AW771706, N76124, AI189033, |
| | | | | | AA584498, AI961771, AA953572, AV719696, AA467957, |
| | | | | | H04879, BE159220, T69889, AV720543, |
| | | | | | H97020, AA467904, AW074001, AF282520.1, AC073310.7, |
| | | | | | AK026100.1, AL030995.1, |
| | | | | | AL445236.22, AC023160.31, AK027219.1, AC003977.1, AC008945.6, |
| | | | | | AJ271735.1, AC012172.6, |
| | | | | | AL161415.2, AL139125.18, AC002217.1, AC023892.35, AL512629.7, |
| | | | | | AC069228.26, |
| | | | | | AC011998.8, AP000075.1, AC008651.7, AL133238.3, AL359816.16, |
| | | | | | AL121694.4, AP000639.4, |
| | | | | | AC004029.1, AL121757.7, AC002349.1, AC027304.3, AC004397.1, |
| | | | | | AF003627.2, AC018637.3, |
| | | | | | AL355615.12, AB038653.1, AC011755.7, AC022468.5, AL133325.20, |
| | | | | | AL356113.8, |
| | | | | | AL121986.12, AC004636.1, AL356213.10, AL390023.8, AC008496.5, |
| | | | | | AC009812.17, |
| | | | | | AL136374.4, AC007388.3, AC005280.3, AL133404.8, AC012309.7, |
| | | | | | X14975.1, AL133240.3, |
| | | | | | AL158069.16, AC011310.3, AL356782.14, AL158055.12, AC010285.4, |
| | | | | | Z84482.1, AL359950.4, |
| | | | | | AL034428.4, AC010145.9, AL441887.9, AC003085.1, Z83836.2, |
| | | | | | AC025420.26, D86996.1, |
| | | | | | AC007392.3, AC007207.22, AC020717.3, AC022316.18, AP002532.1, |
| | | | | | AC012323.7, |
| | | | | | AC026413.5, AL590792.1, AL031387.4, AC022083.6, AL512885.4, |
| | | | | | AK021525.1, AC005614.1, |
| | | | | | AC008162.3, AL136170.12, AF248484.1, AL033524.11, AC079175.24, |
| | | | | | AC007051.3, |
| | | | | | AF127577.2, AC016396.5, AL132715.3, AL359398.2, AP000626.5, |
| | | | | | AC073095.3, AL353580.7, |
| | | | | | AL354758.14, AJ251973.1, AL034545.1, AC004551.1, AC068812.13, |
| | | | | | AP001669.1, AL590404.5, |
| | | | | | AC010276.6, Z73497.1, AC013355.7, AL031775.1, AL049570.11, |
| | | | | | AL590387.7, AC008518.3, |
| | | | | | AC003670.1, AL160236.4, Z95114.19, AC025212.5, AC017060.7, |
| | | | | | AL031224.1, AF127936.2, |
| | | | | | AC004703.1, AC018641.3, AC009037.6, Z81007.1, AL365179.30, |
| | | | | | AL031321.1, AL158841.6, |
| | | | | | AC007917.15, AL031320.6, AC005730.1, AL049589.15, AL121775.3, |
| | | | | | AC004692.1, |
| | | | | | AC007671.7, AC012531.11, AC003686.1, AL121833.10, AC003687.1, |
| | | | | | AL138807.12, |
| | | | | | AL136382.6, AC011752.2, AL445246.4, AB045358.1, AL356108.12, |
| | | | | | AC005157.1, AC017088.8, |
| | | | | | AC006004.1, AL450333.13, AL031119.1, AC004998.2, AC073141.4, |
| | | | | | AC003961.1, AL133211.9, |
| | | | | | AL445239.8, AL356005.9, AL133462.23, AF170702.1, AC005250.1, |
| | | | | | AL159990.12, AC087083.2, |
| | | | | | AC026351.28, AL159976.9, AL034407.1, AC003666.1, AL137016.11, |
| | | | | | AC017099.11, |
| | | | | | AC003955.1, AC063951.22, AC008038.1, AK021760.1, AL023773.1, |
| | | | | | AF128525.2, AC024057.4, |
| | | | | | AC087187.1, AC010411.6, AL392166.19, AL163207.2, AC007907.2, |
| | | | | | Z98036.1, AC087258.14, |
| | | | | | AC007502.5, AK024101.1, AL035671.5, AC019197.7, AC007870.3, |
| | | | | | AF303386.1, AL161426.7, |
| | | | | | AL132639.4, AL512363.11, AC068723.5, AC020637.9, AL360294.11, |
| | | | | | AC010365.5, AL354943.9, |
| | | | | | AL445468.8, AL109854.10, AC004070.1, AC004650.1, AC073130.3, |
| | | | | | AC026214.3, AC087092.1, |
| | | | | | AC005747.1, AC006565.4, AL034417.14, AC010583.5, AL109742.12, |
| | | | | | AC013602.4, U96409.1, |
| | | | | | AC009225.3, AC008561.4, AP002448.3, AP000457.3, AF128894.1, |
| | | | | | AC008083.23, AL359704.9, |
| | | | | | AL118519.25, AC010632.6, AL160397.17, AC007631.3, AL157791.4, |
| | | | | | AC018696.4, |
| | | | | | AC004043.1, AC000126.1, AL445310.9, AL049177.5, AL162414.11, |
| | | | | | AL512348.8, AC004825.2, |
| | | | | | AL161938.6, AL355381.11, AL355852.23, AC007551.1, AL136315.9, |
| | | | | | AP002982.2, AL356311.6, |
| | | | | | AL161804.4, AC018833.3, AC079631.16, AL360270.18, AC020905.8, |
| | | | | | AL117381.32, |
| | | | | | AC007001.2, AL136129.23, AL109942.13, AL109656.10, AL157933.19, |
| | | | | | AB043547.1, |
| | | | | | AL390237.9, AC025519.10, AL359197.20, AC005284.1, AP001331.1, |
| | | | | | AL391495.16, |
| | | | | | AL451146.7, AL035494.8, AL353788.33, AL163953.3, AC004189.1. |
| HCFOM18 | 45 | 553582 | 1-625 | 15-639 | AC007374.6. |
| HCGMD59 | 46 | 636078 | 1-776 | 15-790 | AI346379, AW009453, AA477432, AA152289, BE219294, |
| | | | | | T27069, AI745607, AW852105, AI807602, |
| | | | | | AA234651, AA024744, BE219304, AA065244, N91858, |
| | | | | | AI242569, AI091032, BF977615, AI251849, |
| | | | | | H88431, BE301616, N50522, BE762367, AW607675, |
| | | | | | F03857, H41152, BE696404, R45373, BE070278, |
| | | | | | H88369, AL039156, AU133046, AL038837, AL039074, |
| | | | | | AL039564, AL039109, AL039108, AL037051, |
| | | | | | AL038531, AL039659, AL039625, AL039648, AL039629, |
| | | | | | AL039678, AL039150, AL039128, |
| | | | | | AL037726, T79771, AL040992, AL036725, AL045337, |
| | | | | | AL042909, AL039423, H53427, AL039410, |
| | | | | | AL045353, AL037526, AL036973, AL044407, AL039538, |
| | | | | | AL039386, AL044530, AL036196, |
| | | | | | AL039924, AL039566, AL039509, AL038025, AL039085, |
| | | | | | AL037639, AL038821, AL036767, |
| | | | | | AL043423, AL045341, AL037615, AV743601, H53426, |
| | | | | | AL043422, AV746102, T24119, T24112, |
| | | | | | AW975143, AV758878, AL036238, AL043441, AL036117, |
| | | | | | AL043445, AW013814, AV718844, Z99396, |
| | | | | | AV738934, AL045794, N91869, AV737584, AW973101, |
| | | | | | BF294063, BF508972, AV743654, AL036924, |
| | | | | | AW975229, AW979144, AI535983, AV717989, AV717980, |
| | | | | | AW451070, AV701782, AV718018, |
| | | | | | AV717988, AV731085, AW973200, AV701012, AV718016, |
| | | | | | AV717959, AV717984, AW064110, |
| | | | | | AV718023, AI002696, H00069, AW607606, AV735727, |
| | | | | | AV717963, AV717962, AV720464, AL036733, |
| | | | | | AV745724, AV701118, AV717966, AV745723, AV718002, |
| | | | | | AV719000, AV700229, AV699447, |
| | | | | | AV745917, AV745080, AV717956, AV717960, AL036679, |
| | | | | | AV718858, AL037027, AV745350, T23947, |
| | | | | | AW975161, AL038851, AV717983, AL037054, AV701017, |
| | | | | | AV718681, AL037082, AW976625, |
| | | | | | AL036765, AW975163, AV717965, AL036418, AL036190, |
| | | | | | AV717941, AV740535, AV701043, |
| | | | | | AV701163, AV742995, AV701154, AV719568, AV717970, |
| | | | | | AV745392, AV717978, AL036158, |
| | | | | | AL037177, AW975203, AV717990, AV722801, AV742720, |
| | | | | | AI174488, AI634005, AW973189, |
| | | | | | AW975925, AL037021, AV717942, AV717955, AV717992, |
| | | | | | AW969322, AW979228, AW970679, |
| | | | | | T02921, AV745488, AL036191, AV717968, R47228, |
| | | | | | AV701261, AV743008, AV746162, AV717972, |
| | | | | | AW975312, AW969383, AA150231, AL036964, AL037085, |
| | | | | | AV718006, AL036998, AL036133, |
| | | | | | BF438013, AV741012, AV718010, AV717945, AV718021, |
| | | | | | AV717971, AW979128, AV717964, |
| | | | | | AV724520, AJ293456, AW973190, AV718020, AW975607, |
| | | | | | AV723927, AV744768, AV746335, |
| | | | | | AL036858, AW452756, AV717961, AV718001, AI535783, |
| | | | | | AL037178, BF509207, AV742667, |
| | | | | | AV717986, AV717949, AV718008, AV745369, AV717985, |
| | | | | | AV717946, AV717958, AV717967, |
| | | | | | AL037643, AV701166, AV741888, AL037047, AW979252, |
| | | | | | AV717974, AL036163, AW971000, |
| | | | | | AW063533, AV720607, AV744770, AV718017, AV717993, |
| | | | | | AV718013, AW972784, AA961091, |
| | | | | | AW681208, AV701332, AV742001, AK000326.1, AL139286.13, |
| | | | | | AF093097.1, AF271371.1, |
| | | | | | Z96142.1, X73004.1, AJ244003.1, AJ244004.1, AJ244005.1, |
| | | | | | Y11926.1, D14548.1, Y11923.1, |
| | | | | | D34614.1, L27636.1, S83538.1, M32676.1, S65373.1, |
| | | | | | S78798.1, X73003.1, Y11920.1, |
| | | | | | S85459.1, X92518.1, U50871.1, AB026436.1, D61405.1, |
| | | | | | T87293, H41179. |
| HCNDR47 | 47 | 1016919 | 1-1329 | 15-1343 | AI621217, BF222897, AA632651, AI950250, AW139452, |
| | | | | | AW207039, AA505117, U69203, AI949187, |
| | | | | | AW953975, AI160725, BE348367, AI631345, AA707909, |
| | | | | | AA535510, BG059719, AI680791, AI700776, |
| | | | | | H17406, AA524577, AA062981, AA365529, H16756, |
| | | | | | AI699070, AW970783, BE858688, AI696027, |
| | | | | | BF766585, AV709230, BE220337, AW194354, AA365530, |
| | | | | | AA678861, BE707377, AL122003.17, |
| | | | | | AB007895.1. |
| HCNSB61 | 48 | 526413 | 1-698 | 15-712 | AW964468, AW975618, AV741221, AW966389, AV738928, |
| | | | | | AW949645, AV727978, AW966053, |
| | | | | | AV724520, AV701357, AV738340, AV731070, AW978633, |
| | | | | | AW964532, C14331, AW966330, |
| | | | | | AW960553, AV742090, AV723247, AV744012, AV718489, |
| | | | | | C14429, AW352117, AW752082, |
| | | | | | AV702035, AW753053, AW177440, D80045, AW949642, |
| | | | | | AV744690, AV718800, AW360811, |
| | | | | | AV741220, AW178906, AV718692, AW375405, D59927, |
| | | | | | AV742048, AV718707, AW973541, |
| | | | | | AV721784, AW753067, AV701125, AW178893, AV701216, |
| | | | | | AV701166, AV701149, AV742001, |
| | | | | | D80268, AV649986, AV720791, T03269, AW377671, |
| | | | | | C14389, AV649974, AV720211, AW179328, |
| | | | | | D80134, AA514186, AV701224, AV701154, AW966029, |
| | | | | | AW752110, AW966075, AW966065, |
| | | | | | AW960465, AW973334, AW966531, AW978634, AW966534, |
| | | | | | AW179332, AV742667, AV742022, |
| | | | | | AW966560, AA305409, D58283, AW966022, AV701335, |
| | | | | | AV742430, AV744662, AV701043, |
| | | | | | AW959799, AV701332, AV701017, AV701248, AV701431, |
| | | | | | AW966059, AV723097, AW966013, |
| | | | | | D59859, AW964766, D80022, AV726390, AW966041, |
| | | | | | D80166, AW973474, AW966378, D80195, |
| | | | | | AW975621, AW978648, D80193, AW975613, D59467, |
| | | | | | D51423, D59619, AV701443, AW978661, |
| | | | | | D80210, D51799, AW965163, D80391, D80164, |
| | | | | | D59275, AV720533, D80240, D80253, AW966030, |
| | | | | | AV719822, AW966054, AV720203, AW366296, AW964756, |
| | | | | | AW966050, AV719188, AW973307, |
| | | | | | D80043, D59787, D80227, AW966062, AV719324, |
| | | | | | AV718440, AV718938, AV719783, AV720028, |
| | | | | | D59502, AW959597, AV718633, AW959628, AW960473, |
| | | | | | AW965177, AW975605, AW959570, |
| | | | | | AV719468, AW965185, AW965197, AW965196, AW973485, |
| | | | | | AW965184, AW973488, AW965175, |
| | | | | | AV718931, AV720878, AV718844, AV720464, AV719557, |
| | | | | | AW360844, AV718770, AV720731, |
| | | | | | AW973482, AV720150, AV699447, AW378532, AW958992, |
| | | | | | AW958993, AV722801, AV723927, |
| | | | | | AW959136, AW956397, AW959062, AW964477, AW956434, |
| | | | | | AV699550, AW964488, AW949641, |
| | | | | | AW962082, AW949656, AW360817, AW949654, AV699927, |
| | | | | | AW177501, AW959202, AW177511, |
| | | | | | D80132, AV720151, D81030, AV699746, AW375406, |
| | | | | | AV726921, AW378534, AW973490, D80212, |
| | | | | | AW377672, D80196, D80188, AW179023, AV741187, |
| | | | | | AW178905, AV741198, AV741191, D80219, |
| | | | | | AW973468, BF349328, AV705680, AV649966, AW973423, |
| | | | | | AV718530, AW962395, AV650003, |
| | | | | | AV701123, AW973470, AV699866, AW973473, AA305578, |
| | | | | | AW973445, C15076, D80038, D59610, |
| | | | | | D80366, D57483, AW179329, AV720616, AV701130, |
| | | | | | AV701419, D51022, AV701422, AV758213, |
| | | | | | AW966043, D81026, D50979, D50995, D59889, |
| | | | | | AW753041, AW178762, AW962245, AW973447, |
| | | | | | C14014, AW966023, D80024, AW959469, AW964737, |
| | | | | | AW960454, AW966032, AF271371.1, |
| | | | | | D34614.1, X67155.2, AF058696.1, D88547.1, AB028859.1, |
| | | | | | D50010.1, AB002449.1, U79457.1, |
| | | | | | AB038216.1. |
| HCQCT05 | 49 | 911924 | 1-665 | 15-679 | BF691828, BE463583, C06338, AA826324, AA622862, |
| | | | | | AI890787, AA775044, BE566444, AA621523, |
| | | | | | BF207929, BF208992, BE928360, BE568426, AW873470, |
| | | | | | BF036636, AI632964. |
| HCUGM86 | 50 | 847040 | 1-613 | 15-627 | AA722669, AC005035.1. |
| HCUIM65 | 51 | 550208 | 1-861 | 15-875 | BE781101, BE540200, AI972511, BE300952, AA464837, |
| | | | | | BG150212, AI681901, AW172458, |
| | | | | | AA099207, AW205564, AW408650, AW205714, AA450308, |
| | | | | | AA636047, AI656442, BF437116, |
| | | | | | BE466112, AW575656, AW962721, AW206882, AA099221, |
| | | | | | AI620473, AA369585, AW469939, |
| | | | | | AW136836, BE547752, AI638262, BF059133, AA236642, |
| | | | | | BE551958, AW086133, AI917742, AI623315, |
| | | | | | AC005391.1, AL445584.16. |
| HCWKC15 | 53 | 553621 | 1-696 | 15-710 | AW504485, AI380617, AW805539, AV758903, AL079734, |
| | | | | | AA916430, AW819125, AV762982, |
| | | | | | AI625604, AI792575, AW084445, AW975210, BE138594, |
| | | | | | AW069227, AW023111, AV764259, |
| | | | | | AI792521, BE501593, AW021583, AI890324, BF725844, |
| | | | | | AW438542, BE138509, AV763026, |
| | | | | | AV763058, AA904275, AI521525, AA665330, BE077105, |
| | | | | | AA501461, AW969743, AW327591, |
| | | | | | AA535216, R94326, BF589824, AA574442, AW338179, |
| | | | | | AW271904, AI279417, AA651639, AI859946, |
| | | | | | AA524616, AW020150, AA833896, AV761862, AL042373, |
| | | | | | BE968744, AW004884, BF528591, |
| | | | | | AV760019, AA610509, AU131037, BF804385, AA833875, |
| | | | | | BF725761, AI053688, AI923052, |
| | | | | | AV761714, AI821714, AI792133, AI791913, AA013168, |
| | | | | | T74524, AI355246, AW474168, AI284543, |
| | | | | | BF724838, AI912401, AW068596, AV762633, AI564209, |
| | | | | | AW975626, AI620992, AI821785, AA483606, |
| | | | | | AV756220, AV754716, AA533176, BG236628, AI491765, |
| | | | | | H05940, BE139139, AA504906, AI250552, |
| | | | | | AA019973, BE049032, AA223174, AI798449, AA570740, |
| | | | | | BF965775, AL022238.1, AC006329.5, |
| | | | | | AL359402.3, Z98304.1, AC006948.4, Z84487.2, AC006312.8, |
| | | | | | AC026749.5, AC010627.5, |
| | | | | | AC008623.4, AC016656.5, AC016652.5, AC005531.1, AC004675.1, |
| | | | | | AC006057.5, AL033383.26, |
| | | | | | AL132768.15, AF088219.1, AC004849.1, AL031904.1, AC079177.21, |
| | | | | | AC007318.4, |
| | | | | | AL035659.22, AC074013.5, AC005829.1, AL035252.5, AL590762.1, |
| | | | | | AC005668.1, AC007216.2, |
| | | | | | U95742.1, AC005480.3, AF196969.1, AL158207.15, AC078846.2, |
| | | | | | AL121655.1, AC008754.8, |
| | | | | | AC011443.6, AC007191.1, AC008747.5, AL445217.3, AL161911.17, |
| | | | | | AC006515.7, AL034449.1, |
| | | | | | AJ010597.1, AL031659.9, AC008891.7, AC016543.6, AL109628.5, |
| | | | | | AC009509.7, AB038653.1, |
| | | | | | AJ400877.1, AF317635.1, AL160165.17, AC004106.1, AC004893.1, |
| | | | | | AL049776.3, AL121753.30, |
| | | | | | AC002553.1, AL132777.4, AC010530.7, AC005911.6, AL050349.27, |
| | | | | | AL158830.17, AP002815.3, |
| | | | | | AP001727.1, Z79996.2, AL035455.30, AL033529.25, AC087071.2, |
| | | | | | AC009501.3, AC007570.23, |
| | | | | | AL137229.4, AC004084.1, AC005746.1, AF314058.1, AP001717.1, |
| | | | | | AL365364.19, AC010463.6, |
| | | | | | AC004906.3, AC008044.4, AC022415.5, AC008848.7, AB001523.1, |
| | | | | | AC005387.1, AC007565.1, |
| | | | | | AC020904.6, AC091529.1, AC002316.1, AF283320.1, AL133163.2, |
| | | | | | AC026172.3, AL356113.8, |
| | | | | | AC005079.6, AL163210.2, AP001725.1, AF348209.1, AC002369.1, |
| | | | | | AC008784.6, AL161937.13, |
| | | | | | AC011481.4, AL354735.14, AC008622.5, AF111167.2, AC011890.4, |
| | | | | | AC006449.19, AL352978.6, |
| | | | | | L78833.1, AL096761.1, AC004593.1, AL096701.14, AL136300.22, |
| | | | | | AL121949.13, AL031432.1, |
| | | | | | AP001561.4, AC013355.7, AC090958.1, AL133153.3, AC005837.1, |
| | | | | | L47234.1, AC004448.2, |
| | | | | | AP000500.1, AC005840.2, Z95114.19, AJ011930.1, AL359091.10, |
| | | | | | AL163300.2, AC003101.1, |
| | | | | | AL139415.10, AC011485.6, AC007738.2, AC005225.2, AC002477.1, |
| | | | | | AC012306.11, |
| | | | | | AL035413.19, AC006146.2, AL109798.19, AL512347.14, AL109925.11, |
| | | | | | AC008762.6, |
| | | | | | AL355543.13, AC022468.5, AL162252.17, AP001753.1, AL121905.23, |
| | | | | | AC005283.2, Z98742.5, |
| | | | | | AL137145.13, AC006126.1, AL136039.4, AC003070.1, Z82244.1, |
| | | | | | AP000088.1, AC005792.1, |
| | | | | | AC025540.7, AC010583.5, AC090949.1, AL158196.24, AC011495.6, |
| | | | | | AL354932.26, |
| | | | | | AC024028.10, AL031846.2, AC087590.1, AC026776.4, AC005726.1, |
| | | | | | AL159156.15, |
| | | | | | AC006064.9, AL136296.3, AC011472.7, AF196779.1, AC018663.3, |
| | | | | | AC009269.6, AL138720.19, |
| | | | | | AC007685.2, AC011479.6, AL139082.18, AL132712.4, AL079341.19, |
| | | | | | AC006274.1, |
| | | | | | AL136526.27, AL117692.5, AC006028.3, AL139041.17, AC004019.20, |
| | | | | | AC020550.4, |
| | | | | | AC009623.6, AC005529.7, AC003681.1, AC004882.2, AC004840.3, |
| | | | | | AC022150.5, AC018673.4, |
| | | | | | AL161799.19, AL359704.9, AL138680.15, AC011450.4, AC005578.1, |
| | | | | | AL136303.15, |
| | | | | | AL133465.30, Y14768.1, AF165926.2, AC011461.4, AC000052.16, |
| | | | | | AC025165.27, AC002310.1, |
| | | | | | AP000343.1, AF129756.1, AC007021.3, AL133245.2, AC005089.2, |
| | | | | | AC007597.3, AL022163.1, |
| | | | | | AF168787.1, AC074295.7, AP000252.1, AP000505.1, AL031587.3, |
| | | | | | AF243527.1, AL138836.15, |
| | | | | | AL353807.18, AL139232.13, AP000065.1, AC016894.7, AC018636.4, |
| | | | | | AC083884.6, AL139317.5, |
| | | | | | AL021546.1, AL136179.15, Z99716.4, AL049643.12, AL022336.1, |
| | | | | | AC008372.6, AP001169.1, |
| | | | | | AC018696.4, AC007263.4, AP001747.1, AC007679.4, AC006455.2, |
| | | | | | AL133448.4, AC009412.6, |
| | | | | | AC004491.1, AC073897.6, AC007055.3, AC004655.1, AP000215.1, |
| | | | | | AC004998.2, AC002350.1, |
| | | | | | AC012309.7. |
| HCWUM5 | 54 | 639037 | 1-1414 | 15-1428 | AW967979, AA937109, AA465498, AA465250, AW967765, |
| | | | | | AA262829, AA743297, H93605, |
| | | | | | AA325051, AW450216, H93604, AW206258, AU118507, |
| | | | | | BF513214, AW968591, BE934985, |
| | | | | | AA465142, AA309767, BE934984, AA204640, BE702699, |
| | | | | | BF795992, BG116852, AA765520, |
| | | | | | BF229206, BE838848, BE838830, AW499814, BE838839, |
| | | | | | BE163480, AU118047, AL158207.15, |
| | | | | | AF265550.1, AK000975.1, AB011126.1, AK001616.1, AK023681.1. |
| HDABR72 | 55 | 1301517 | 1-1677 | 15-1691 | BE294597, AA749068, AI284640, AL046409, BF677892, |
| | | | | | AW193265, AI431303, AL138265, AI334443, |
| | | | | | AV760777, AI613280, AV763354, AW419262, BF668217, |
| | | | | | AV760937, AI963720, AV740801, |
| | | | | | AI281881, AF330238, AI345654, AW502975, AV710066, |
| | | | | | AI270117, BG249643, AI305766, BF311000, |
| | | | | | BG109996, AV762098, AV734666, AW965008, AW576391, |
| | | | | | BF337291, AV762050, AV761362, |
| | | | | | AA610491, AW410400, AW833862, AL045053, AI345518, |
| | | | | | AL138455, AW327868, AV728425, |
| | | | | | AI350211, AW270270, BE047069, BF697673, AV735370, |
| | | | | | AW500125, AV764307, AV761489, |
| | | | | | AV762111, AV764578, AV762395, AA631507, AV725423, |
| | | | | | AV763255, AV763971, BF679304, |
| | | | | | BG222267, AA526787, AL044940, F36273, AA469451, |
| | | | | | AI610159, AL041690, AV759274, AV761786, |
| | | | | | AL119691, AI305547, AA490183, AI754658, AV762139, |
| | | | | | AL037683, AI821271, BF241967, BG236735, |
| | | | | | AV757607, AI568678, BE350475, AV764241, AA491814, |
| | | | | | AW872676, AI708009, AA720702, |
| | | | | | AW472872, BG059568, AI053672, AW963497, AI133164, |
| | | | | | BF827410, AL042420, AW439558, |
| | | | | | AI289067, AW969629, AW974109, BG171096, AW438643, |
| | | | | | AI355206, BF681576, AL046205, |
| | | | | | AW276827, AV760774, AV762064, AV756693, AV652936, |
| | | | | | AL120687, BF130107, AI149478, |
| | | | | | AW975425, AV763633, BE049139, AA468131, AI471481, |
| | | | | | AV760042, AI688846, AV762959, |
| | | | | | BF854876, AV759505, AW269488, AV764398, AI537506, |
| | | | | | AV762397, AV763670, AV658688, |
| | | | | | BF940837, AV763195, BE154617, AW088202, AW407578, |
| | | | | | AI679782, AW630298, AV762535, |
| | | | | | BE872393, AI619997, AI341664, AI345681, AI345675, |
| | | | | | AI801482, AV733830, AF074677, AW406162, |
| | | | | | AW103758, AV763540, AV762154, AW193432, BF475381, |
| | | | | | BF964720, AA623002, AI375710, |
| | | | | | AV682003, AV759382, AV757425, AW083402, AI633025, |
| | | | | | AW972769, AW029038, AW511743, |
| | | | | | BE042649, AI053790, AV762009, AI919265, BG104686, |
| | | | | | AW021207, BF724372, AI061334, AA984708, |
| | | | | | AV760057, AU151000, AU145314, BF939954, AI499938, |
| | | | | | AW406755, AI085719, AV763122, |
| | | | | | BF851403, BE049095, AW148792, AV759580, BE206443, |
| | | | | | AI799642, AW023672, AV761843, |
| | | | | | AW162049, AI962050, AI929531, BF680805, AA483223, |
| | | | | | AW088846, AI281697, AW969698, |
| | | | | | AW969694, AI732865, BF679274, BF984160, BG056088, |
| | | | | | AV761403, AW872575, AV762826, |
| | | | | | AL119649, AV761106, AI446601, AI249997, AI434695, |
| | | | | | BF793766, AV761188, AW979031, |
| | | | | | BC003642.1, AC018795.9, AC005280.3, D83989.1, AC022148.5, |
| | | | | | AF077058.1, AC009161.12, |
| | | | | | AC002470.17, AC083868.2, AF015151.1, AL022724.2, Z93023.1, |
| | | | | | AP001666.1, AC007308.13, |
| | | | | | U18391.1, U18392.1, X55925.1, AC084882.2, AL590964.8, |
| | | | | | AF015149.1, AF015156.1, |
| | | | | | U57005.1, U57006.1, U18394.1, AC009086.5, X53550.1, |
| | | | | | AL031123.14, AC073655.26, |
| | | | | | AC012077.4, U57008.1, AC004862.1, AC009475.4, AC008039.1, |
| | | | | | X55926.1, U57009.1, |
| | | | | | AC006211.1, U18395.1, AF015157.1, AP000901.5, U18393.1, |
| | | | | | U57004.1, AL137839.6, |
| | | | | | AF015147.1, AL031121.5, AC009952.4, AL049759.10, AP001725.1, |
| | | | | | AC007367.3, U57007.1, |
| | | | | | X54180.1, AC008760.6, AP000557.2, X54181.1, X54178.1, |
| | | | | | AC021752.5, X75335.1, |
| | | | | | AC055740.17, U18399.1, U18387.1, AL109965.34, M37551.1, |
| | | | | | AC005231.2, AL590762.1, |
| | | | | | X55931.1, X54179.1, AL109935.39, AL031542.1, AL021393.1, |
| | | | | | X54175.1, AB045361.1, |
| | | | | | X55924.1, AP001172.1, AC034242.5, AC016830.5, AC011485.6, |
| | | | | | U67801.1, AF215937.1, |
| | | | | | AC005257.1, U02531.1, AL161756.6, X54176.1, AL049588.11, |
| | | | | | AF196779.1, AL096841.6, |
| | | | | | AL359513.12, AC011480.3, U18398.1, AL121581.41, AC008101.15, |
| | | | | | AC018644.6, AP001972.4, |
| | | | | | AC020740.5, AC005911.6, AL163282.2, AC005484.2, U18396.1, |
| | | | | | AC007957.36, AF015148.1, |
| | | | | | AL139113.21, AC034145.5, AC069255.18, AC005234.1, AL023803.3, |
| | | | | | X55923.1, AF109907.1, |
| | | | | | AL049835.3, AC007324.55, AB020863.1, AC005011.2, AC004098.1, |
| | | | | | AC007318.4, |
| | | | | | AC008079.23, AL512666.6, U82671.3, AC005047.3, AL034420.16, |
| | | | | | AL050328.24, AC004813.2, |
| | | | | | AL451103.7, AC073651.23, AF042090.1, U02532.1, AC073581.23, |
| | | | | | AL031005.1, U18390.1, |
| | | | | | AL008725.1, AC000075.2, AL121897.32, AC009269.6, AP002534.1, |
| | | | | | AL354928.9, AC022415.5, |
| | | | | | AP000161.1, AC035150.1, Z82901.1, X55922.1, AC008622.5, |
| | | | | | AL354915.5, AL445189.7, |
| | | | | | X76070.1, AL035696.14, AL122035.6, AC018633.2, AL359751.12, |
| | | | | | AC034186.4, AL137229.4, |
| | | | | | AC004971.3, AL021918.1, AL121970.17, AC006479.2, AL159155.8, |
| | | | | | AL049691.18, AC004263.1, |
| | | | | | AC006329.5, AC074191.3, AL158218.11, U18400.1, AL132987.4, |
| | | | | | AC090841.1, AL357515.26, |
| | | | | | AL356020.3, AC009506.5, AC005785.1, AL590709.5, AC002365.1, |
| | | | | | AL049647.7, AC004662.1, |
| | | | | | AL122013.5, AC005664.2, AC073347.3, AP001731.1, AC008119.6, |
| | | | | | U67221.1, AL158141.14, |
| | | | | | AL021154.1, AP001688.1, Z99129.1, AL357518.15, AL359637.14, |
| | | | | | AL132642.4, AC012306.11, |
| | | | | | X55927.1, AL133332.12, AC004257.1, AC005215.1, Z83840.7, |
| | | | | | AL590076.3, AC005632.2, |
| | | | | | AC005918.12, AL035450.1, AC006270.1, AP000556.2, X55932.1, |
| | | | | | AL158159.14, AL109825.23, |
| | | | | | AC009996.7, AL031661.28, AL512430.14, AK024206.1, AL118501.22, |
| | | | | | AP001434.1, |
| | | | | | AC073145.8, AL139327.18, AP000348.1, AC008744.6, Z95114.19, |
| | | | | | AE006463.1, AL359085.14, |
| | | | | | AC027319.5, Z74739.1, AL356801.5, X54177.1, AC072052.6, |
| | | | | | AC004858.2, AF196971.1, |
| | | | | | AL392110.12, AC021382.6, AC023669.8, AP000020.2, AC003006.1, |
| | | | | | AC007879.3, AL096707.12, |
| | | | | | AF085913.1, AL132874.30, AL445212.9, AL080242.11, AL035446.4, |
| | | | | | AL121989.12, L47228.1, |
| | | | | | AL031681.16, AL161666.4, AC017079.5, AC006433.18, AC009131.6, |
| | | | | | AC008555.5, AF015150.1, |
| | | | | | AC010422.7, AC004028.1, AL050341.18, AC087239.18, AC006327.3, |
| | | | | | AC005341.12, |
| | | | | | AC019205.4, AC005755.1, AC009470.4, AF015153.1, AC011484.4, |
| | | | | | AL022324.1. |
| HDPBA28 | 56 | 1062783 | 1-3433 | 15-3447 | T27258, AU140225, AI634860, AI767588, BE536545, |
| | | | | | AV689583, AI991689, AI635347, BE386012, |
| | | | | | BE767008, AW976840, AI640606, BE178142, BE177971, |
| | | | | | AW502888, AA977785, AI979247, |
| | | | | | AW503911, AA971157, AL135446, T27536, AA491080, |
| | | | | | W74279, R07065, AI687230, T27535, |
| | | | | | AW816221, AA436906, BE151455, BF510035, BF803181, |
| | | | | | BE151443, AA152394, AW505067, |
| | | | | | BG003144, AA761110, AA377229, AV648450, BE671931, |
| | | | | | AI873792, AA397568, AA399529, |
| | | | | | AA679080, AI382296, AV648107, AV648212, AV648537, |
| | | | | | AI913234, AI741350, R50230, AI920850, |
| | | | | | AI018184, AA702114, AI244588, R81654, AI126673, |
| | | | | | AA152500, BG057181, AA148355, BE817269, |
| | | | | | AF222340.1, AF183569.1, AF106037.1, AB011097.1, AC008906.5, |
| | | | | | AC009073.8. |
| HDPCJ91 | 58 | 740748 | 1-6093 | 15-6107 | AU119059, AW959367, BF792861, BF672087, BE439439, |
| | | | | | BE717153, BE770928, BE718895, |
| | | | | | AW971539, AL079949, BE770941, BF687684, BF132755, |
| | | | | | BF727151, BG009815, AI703121, AI066742, |
| | | | | | BE968461, BE717019, AW444843, W61007, AI949993, |
| | | | | | AW502324, AI150343, AI859085, AA393478, |
| | | | | | AW467411, BF515251, BF063545, BE717046, BE042969, |
| | | | | | BE673935, AU154204, AA292253, |
| | | | | | AA838717, AU145486, AI273190, AW512776, BF727150, |
| | | | | | AI084372, AI597583, AI457829, H99255, |
| | | | | | AW474793, BE327577, AI697937, AI167388, AI684736, |
| | | | | | W69563, W31042, AW753588, N98496, |
| | | | | | AI307397, AW613687, AW241267, BF198110, W60918, |
| | | | | | AA291214, AW316965, BF090819, |
| | | | | | AA988341, AA908177, AA043254, AA651802, AA502341, |
| | | | | | BE536255, AA043612, BF431421, |
| | | | | | AI261626, BF214133, AA972952, AI334810, R80993, |
| | | | | | AI539739, D62886, AI611313, N28297, H99484, |
| | | | | | AI825223, AW938439, T65655, AI221607, AA169878, |
| | | | | | AA435697, AA262010, W69419, F11961, |
| | | | | | T34633, AI873428, AI457907, BF103809, T65584, |
| | | | | | AI695552, AA126467, AA641749, AW882312, |
| | | | | | N52582, BG149944, BE669976, D57676, AA169566, |
| | | | | | AA126647, F09610, AA446424, R78978, |
| | | | | | AA291524, D62733, T15751, AA169579, AA628830, |
| | | | | | AI796712, G18687, AA649257, AI431924, |
| | | | | | BE763704, AW374026, AV746759, AA091017, R13144, |
| | | | | | D79785, BF589508, R40624, R78884, |
| | | | | | AA250810, T20017, AA747613, BF725884, BF806370, |
| | | | | | AI733856, BF832074, AI635440, BF827469, |
| | | | | | AW504299, AI683131, AI291823, AI732789, AA236703, |
| | | | | | AI251034, AI355587, BE139139, AI336054, |
| | | | | | AI312790, AI250552, AW963463, BG222875, AI039809, |
| | | | | | AI223626, BF725844, AI284543, AI251284, |
| | | | | | AI251203, AW268329, AI254770, AA602906, AW673941, |
| | | | | | AV764259, AV647070, AI569086, |
| | | | | | AW303098, AA524800, AI249886, AI251241, AW474921, |
| | | | | | AV737641, BE042006, AI082510, |
| | | | | | AW971342, AW088049, AW068007, AK001067.1, AL161732.7, |
| | | | | | AC007688.15, AP001718.1, |
| | | | | | AL163281.2, AC009134.6, AC068724.7, AL117336.22, AL359382.23, |
| | | | | | AL121890.34, |
| | | | | | AC007540.3, AC008651.7, AL139405.11, AL031388.1, AC069255.18, |
| | | | | | AC006013.3, |
| | | | | | AC015977.9, AC010742.4, AC008891.7, AC025280.4, AC018764.6, |
| | | | | | AC005747.1, AL158052.10, |
| | | | | | AC011247.10, AC002072.1, AC007792.1, Z82203.1, AC004593.1, |
| | | | | | AC010616.5, AC068799.14, |
| | | | | | AL121656.2, AF020503.1, Z83822.1, AC005874.3, AF134471.1, |
| | | | | | AC073542.4, AC004752.1, |
| | | | | | AL161757.4, AL023575.1, AC006021.2, AC004638.1, AL161670.4, |
| | | | | | AL117377.18, AL050335.32, |
| | | | | | AL590636.12, AC002287.1, AL139187.19, AC068722.6, AL137061.12, |
| | | | | | AL163052.4, |
| | | | | | AL031132.2, AP001726.1, AL138885.21, AC007225.2, AC004953.1, |
| | | | | | AL137783.12, AL133373.5, |
| | | | | | AP000696.1, AP001712.1, AC019187.3, AL355365.10, AL132768.15, |
| | | | | | AL021395.16, |
| | | | | | AL512307.12, AP001706.1, AC010145.9, AL031273.1, AC017100.4, |
| | | | | | AP001694.1, AC020917.4, |
| | | | | | AL160411.25, AL139317.5, AC007639.5, AC090948.1, AC009333.10, |
| | | | | | AC015541.21, |
| | | | | | AC005538.2, Z82244.1, Z83845.14, AC016831.1, AC009505.3, |
| | | | | | AC004949.1, AC004965.2, |
| | | | | | AC005358.1, AC007388.3, AC007462.2, AC073581.23, AC008513.7, |
| | | | | | AC006483.3, |
| | | | | | AL356244.12, AC002368.1, AC026162.5, AC020741.4, AL096814.26, |
| | | | | | AL390755.5, |
| | | | | | AC005514.1, AC008474.7, AC007151.2, AC011359.5, AP002852.3, |
| | | | | | AC008066.4, AC004032.7, |
| | | | | | AL034405.16, AL442064.10, AC019046.4, AC006115.1, AP002851.2, |
| | | | | | AL138725.19, |
| | | | | | AL163209.2, AP001705.1, AC078878.20, AL138755.13, AC003950.1, |
| | | | | | AC011331.2, AC002367.1, |
| | | | | | AC022308.17, AL137780.10, AC069262.24, AL035415.22, AL035697.19, |
| | | | | | AP001729.1, |
| | | | | | AP001674.1, AL034549.19, AL356095.11, AF134726.1, AF130342.1, |
| | | | | | AL163249.2, AC004905.1, |
| | | | | | AC010149.8, AL390838.26, AL132709.5, AC074121.16, AC004891.1, |
| | | | | | AC008812.7, |
| | | | | | AC005274.1, AL133255.13, AC010271.6, AL157881.14, Z83826.12, |
| | | | | | AC034198.6, AL031687.17, |
| | | | | | AC006211.1, AL031228.1, AF001549.1, AL449106.15, AC025438.5, |
| | | | | | AC091118.2, AC063951.22, |
| | | | | | AC003012.1, AC004383.1, AL354680.14, AC004913.2, AC009263.6, |
| | | | | | AC002476.1, Z97353.3, |
| | | | | | AL445472.14, AC008738.6, AP000014.2, AC016673.5, AC005803.1, |
| | | | | | AC022336.12, AL158206.8, |
| | | | | | AC090517.2, AC006430.22, AC006345.4, AC011464.5, AC016716.6, |
| | | | | | AP002342.3, AC005703.2, |
| | | | | | AF168787.1, AP000563.1, AP001688.1, AC004885.2, AC023668.4, |
| | | | | | AP001619.1, AL513366.11, |
| | | | | | AP000236.1, AC005939.1, AL137140.12, AL133355.12, AC012000.3, |
| | | | | | AC011443.6, AC008440.8, |
| | | | | | AL133387.8, AP001666.1, AF124730.2, AC012502.3, AC002365.1, |
| | | | | | AL133391.5, AC010543.8, |
| | | | | | AC006120.1, AL138997.18, AL133215.16, AB023048.1, AC005988.1, |
| | | | | | AC008507.8, |
| | | | | | AC022007.3, AL513131.1, AC079954.18, AL360078.16, AC018731.5, |
| | | | | | AC009044.3, |
| | | | | | AL138836.15, AL031846.2, Z73417.1, AC020901.8, AC073897.6, |
| | | | | | AL133551.13, AC010722.2, |
| | | | | | AC004673.1, AC006288.1, AC004491.1, AL136979.16, AL022334.1, |
| | | | | | AL031658.11, AL031776.7, |
| | | | | | AL445189.7, AC006239.5, AC006334.3, AL161421.11, AC002565.1, |
| | | | | | AC004382.1, |
| | | | | | AL359744.17, AC009518.7, AC022206.3, AC020906.6, AC018809.4, |
| | | | | | AC002331.1, |
| | | | | | AC079310.20, AC006327.3, AF243527.1, AL157818.12. |
| HDPCL63 | 59 | 1019008 | 1-3023 | 15-3037 | AL040501, AL040502, BF312113, BF311401, BF312099, |
| | | | | | BF969955, BG118304, BE889750, BF528529, |
| | | | | | BE892499, BE378197, BE796737, BE312325, AL043139, |
| | | | | | BG033292, BE314857, BE312562, |
| | | | | | AW961051, BE875599, BE395864, BF528758, BF312036, |
| | | | | | BF982580, BF511000, BF206591, BF689722, |
| | | | | | BE278785, BE301032, BE538635, BF062495, AI074169, |
| | | | | | BF063302, BF528817, BE550763, AI439151, |
| | | | | | BF568696, AA143267, BE044341, AA534289, AI968616, |
| | | | | | BE644848, AI374815, AA025730, AI718363, |
| | | | | | AA984833, BE893882, AW084880, AW952114, BG012441, |
| | | | | | AA722825, AA514696, AI809529, |
| | | | | | BF835155, BF892650, AA932271, BF739765, BF894752, |
| | | | | | BG059761, AA134803, AI828209, AA460484, |
| | | | | | AI042088, AA134802, AI640382, R51678, AI925709, |
| | | | | | AI669079, AW469179, AI199232, BF900427, |
| | | | | | R53751, BF349740, BE279833, BE273231, AI640403, |
| | | | | | AI074545, BF753080, AW579547, BE731727, |
| | | | | | AI659329, AW002463, AA233548, AI003456, BG222370, |
| | | | | | AW137214, AA230095, T55730, H43116, |
| | | | | | AW962595, BF001788, AI670726, AA626289, BF910860, |
| | | | | | AV748998, AW276888, AA323567, |
| | | | | | AA233662, Z45129, H45702, BE245940, BE383639, |
| | | | | | R40971, R53750, AA037073, T03319, BF813413, |
| | | | | | BE074131, BF691850, BE244555, BE146067, BF924555, |
| | | | | | BF244566, AI141636, AA339051, H45753, |
| | | | | | BF691075, BF690883, H42344, AA291701, AI884572, |
| | | | | | AA356368, AW080418, AW071165, AW296941, |
| | | | | | AA631213, AA317597, R39383, AA324321, BE244793, |
| | | | | | BF221497, AI278324, BF977743, AA025729, |
| | | | | | BF055230, R10660, AA429477, AI468432, AA291748, |
| | | | | | AI537969, H52665, U46451, AI979165, |
| | | | | | BF570791, AA378387, AI918383, BF923133, AA455817, |
| | | | | | AW103386, BF868375, BF868370, |
| | | | | | AA922522, BF977581, R38308, Z39044, R51590, |
| | | | | | BF737690, BF976877, R12982, F04029, AI868824, |
| | | | | | T55772, AW263568, AA233779, R14452, T31372, |
| | | | | | AA292264, AA287135, AI560594, BF691578, |
| | | | | | AV743961, AA284706, BF894453, Z42923, AW152063, |
| | | | | | AI916442, BE694236, AA338803, BE049333, |
| | | | | | BE904088, T32117, BF933303, BE889979, BF914434, |
| | | | | | BF894452, BF764158, BE708005, BE892537, |
| | | | | | T92457, BF811804, BF994428, AI440263, BG167249, |
| | | | | | AI866465, AI828574, AI623736, AL513907, |
| | | | | | AW151136, AI539771, BE897632, AI537677, AI494201, |
| | | | | | AL513817, BF812963, AI500659, AI815232, |
| | | | | | AI801325, AI500523, AI538850, AI582932, AI923989, |
| | | | | | AI284517, AI872423, AI500706, AI445237, |
| | | | | | AI491776, AW151138, AI889189, AI521560, AI500662, |
| | | | | | AI866786, AW172723, AI284509, AI539800, |
| | | | | | AI538885, AI889168, AI866573, AI633493, AI434256, |
| | | | | | AI866469, AI805769, AI434242, AI888661, |
| | | | | | AI284513, AI500714, AI888118, AL096879.1, AL117649.1, |
| | | | | | AL021977.10, AL020993.1, |
| | | | | | BC004310.1, AL049426.1, AC004213.1, AL133070.1, AL136781.1, |
| | | | | | AL110196.1, AL136862.1, |
| | | | | | Z98744.1, AL136763.1, AL133049.1, AL110199.1, AL137523.1, |
| | | | | | AC069387.8, AL122049.1, |
| | | | | | AL049423.1, AL133080.1, AF132495.2, AL133084.1, AL133655.1, |
| | | | | | AL136765.1, AL050116.1, |
| | | | | | AL136825.1, AF090943.1, AF271350.1, AF002985.1, L40386.1, |
| | | | | | AL133607.1, AL080234.1, |
| | | | | | AL133015.1, BC002695.1, BC008904.1, AL133053.1, AK000645.1, |
| | | | | | BC008723.1, AB060917.1, |
| | | | | | AL136747.1, AB031069.1, AB063100.1, AL162062.1, AC007383.4, |
| | | | | | AL512733.1, BC008387.1, |
| | | | | | AL162272.10, S77771.1, AK027116.1, AB060842.1, AL050155.1, |
| | | | | | AK026480.1, AB046642.1, |
| | | | | | AL022723.4, AL133608.1, AL133072.1, AC008755.6, AL122110.1, |
| | | | | | AB048994.1, AK026086.1, |
| | | | | | AL122050.1, BC003591.1, AK025099.1, AB063077.1, AL133077.1, |
| | | | | | AF081195.1, AA443486. |
| HDPCO25 | 60 | 460682 | 1-753 | 15-767 | AI193249, AI809829. |
| HDPGT01 | 61 | 771583 | 1-2673 | 15-2687 | AL524311, BG251269, BF310537, AU133126, BF683381, |
| | | | | | BF038290, AW732293, BF316433, |
| | | | | | AW170099, AI056333, BF349288, AA972732, AI675184, |
| | | | | | AW177595, BE141799, AW664330, |
| | | | | | BG056730, AW751928, BE141798, AU157403, AI803604, |
| | | | | | AW516199, AI421509, AI089433, |
| | | | | | AA622275, AU154510, AA699595, AW733094, BF838983, |
| | | | | | AI148225, AA921836, AA701632, |
| | | | | | AI361562, H75815, AV701643, AA931757, AA825979, |
| | | | | | BE837455, AI247022, AA035572, AI015040, |
| | | | | | AI032666, AW167576, T89750, BF349289, H06815, |
| | | | | | AI168573, AI702086, W42567, Z43621, |
| | | | | | AA505697, R92850, AI204070, AA724075, H06816, |
| | | | | | W72651, R93066, W76613, W42546, W86249, |
| | | | | | AW751931, AI272047, T16739, AI868745, AA860360, |
| | | | | | AI207229, AI249348, AI073394, AA035062, |
| | | | | | AA758712, AI204396, T11609, AA649046, AI168656, |
| | | | | | AA729782, AL110209.1, AL389957.1, |
| | | | | | AK001705.1, AB017494.1. |
| HDPHI51 | 62 | 460679 | 1-714 | 15-728 | AC005946.1, AC018755.3. |
| HDPJM30 | 63 | 879325 | 1-1621 | 15-1635 | AI420713, BF951818, R85260, H28149, BF899899, |
| | | | | | BF594396, AW292642, H44846, BF685411, |
| | | | | | AI739196, AI867313, BF063759, AI380559, BE504664, |
| | | | | | AW166357, BE735346, BF064117, |
| | | | | | AB001535.1, AP001754.1, AP001065.1, AP001064.1. |
| HDPND46 | 64 | 637586 | 1-1713 | 15-1727 | BG058578, D20888, AL034424.9. |
| HDPOJ08 | 65 | 731863 | 1-1641 | 15-1655 | BF968799, BF791555, AL513581, BE879926, AI949941, |
| | | | | | BE827843, BF968555, AI765763, BE875907, |
| | | | | | AW959968, AW382167, BF692458, BE876162, BF106234, |
| | | | | | AV713629, AV699640, AW382174, |
| | | | | | AU136532, BF692025, AA449500, AW902068, AW583040, |
| | | | | | BF212019, AW382170, AI768711, |
| | | | | | AI918137, AW235520, AI199832, AI074542, AA243341, |
| | | | | | AA071031, AL513582, AI308913, BE150978, |
| | | | | | AW609396, AA604828, AA831297, AI304674, BE151243, |
| | | | | | AW391610, AA704776, BE150919, |
| | | | | | AU155999, AW389522, AA878385, BF979062, BE150848, |
| | | | | | BE150932, AA554171, AI086256, |
| | | | | | AI285140, W48831, AW379916, BF215357, AW389518, |
| | | | | | AI361484, AI290204, BE150880, AA679730, |
| | | | | | AA285176, AI367820, BF570762, AA287652, AI028778, |
| | | | | | AI342266, AI332795, BE501465, AW609661, |
| | | | | | AA564884, AA497006, BF432681, BF438907, AA496929, |
| | | | | | AI742352, BF572848, AA824372, |
| | | | | | AW582335, AA286805, AA809400, AA101705, BE150881, |
| | | | | | H50009, AI356809, AI863722, AA449072, |
| | | | | | AW394227, N64570, BE614989, H66597, BE465872, |
| | | | | | AU157281, BF792958, AW394207, BE702178, |
| | | | | | AI860155, BE702109, T96603, BF792810, AW802638, |
| | | | | | H47883, BE702071, AW391634, AA425753, |
| | | | | | BE149864, BF766698, BF766705, T96711, R59882, |
| | | | | | AW816178, AI301234, AA524763, AW582392, |
| | | | | | AW609367, AA427806, AA243537, H89251, AA297709, |
| | | | | | BE892299, AI703471, AA284029, W49812, |
| | | | | | AI458780, AW075621, H89250, AI867621, AW380564, |
| | | | | | BF912063, H66596, AW380556, AW814225, |
| | | | | | AW380562, AA730264, R59881, AI433332, AA210752, |
| | | | | | AA863154, BF513435, H47884, AA211712, |
| | | | | | C00853, AU137710, AI269992, AW337692, AA489590, |
| | | | | | AA070527, AA101704, AW391666, |
| | | | | | AA296965, AA296966, AA497092, AI570809, BE673630, |
| | | | | | T25724, AW582435, BE150974, AW391617, |
| | | | | | AI954461, BF999751, AW152174, BE876251, AI587112, |
| | | | | | BF764712, AW816180, AW102931, |
| | | | | | AK024215.1, AK023478.1, AB014732.1. |
| HDPPN86 | 66 | 1037893 | 1-6283 | 15-6297 | BE250002, BE394338, AW935469, AW749660, BG250570, |
| | | | | | BF982358, AI821271, BE541597, |
| | | | | | AI313180, BE293706, BE872198, W22478, AW976010, |
| | | | | | AI002815, AW963152, AU117456, AV762145, |
| | | | | | AV760760, BF792326, AW965008, AV764490, AW837083, |
| | | | | | AV700498, BG032943, AW600804, |
| | | | | | AV733710, AV759172, AA680243, AU123691, BE908796, |
| | | | | | AL037632, BE796439, AI076616, |
| | | | | | AW406162, AI732120, BF339640, AV700988, AA484962, |
| | | | | | AV699709, AW965642, AF074667, |
| | | | | | BE902459, AV760599, BG164166, BE273856, AI313166, |
| | | | | | AU118745, BE387734, AW961994, |
| | | | | | AA381195, AI364780, AU159301, AV761286, AA722372, |
| | | | | | AU158602, BE154495, AL044000, |
| | | | | | BG250302, AL041706, AL040921, AV700545, AU145083, |
| | | | | | AI817516, AV729960, AV760258, |
| | | | | | AW820787, BE071876, BF965477, BE071877, AW974126, |
| | | | | | AV759362, AI565581, AI284640, AI963600, |
| | | | | | AI608771, AL048626, AW440545, BF677892, AI204304, |
| | | | | | BE902975, AW317075, AA836811, |
| | | | | | AW088224, BF337291, AA634072, AI350211, AV704375, |
| | | | | | AV760777, AW193265, BF668217, |
| | | | | | AI133164, AV762395, BF736198, AW953071, AU157011, |
| | | | | | AW833862, BF241967, AL046409, |
| | | | | | AW995093, AV711987, AA491814, N94311, AI431303, |
| | | | | | AI963720, AW276817, BF828714, AI613280, |
| | | | | | AV762098, AA601355, BG249643, BF697673, AF330238, |
| | | | | | AV760937, AV728425, AW080939, |
| | | | | | AA599480, AV740801, BE156019, AI924251, AA469451, |
| | | | | | F36273, AV658688, BF055844, AI289067, |
| | | | | | AL119691, AV763354, AI061334, AV763971, BG058664, |
| | | | | | BF680074, AV725423, AL045053, |
| | | | | | AW970915, AW975425, AI471481, AI305766, AL138265, |
| | | | | | BE350475, AI679294, AA205915, AI754955, |
| | | | | | AL137737.1, BC001041.1, AK000310.1, AC010366.5, AC005280.3, |
| | | | | | AL137852.15, AC022148.5, |
| | | | | | AC004263.1, AP001666.1, AP001630.1, AE006463.1, AL354932.26, |
| | | | | | AC005484.2, AL590762.1, |
| | | | | | AF088219.1, AC007782.20, AC004134.1, AC005288.1, AC011811.42, |
| | | | | | AC005911.6, |
| | | | | | AL161656.20, AC072052.6, AC009470.4, U47924.1, AC004859.2, |
| | | | | | AL035587.5, AL162505.20, |
| | | | | | AC073138.3, AC025166.7, AL359552.16, AC007954.7, AC034242.5, |
| | | | | | AL139317.5, AC011455.6, |
| | | | | | AL022724.2, AL109965.34, AC068533.7, AL161779.32, AP000359.1, |
| | | | | | AC010271.6, |
| | | | | | AL109825.23, AL122013.5, AL163282.2, AC020893.5, AC005324.1, |
| | | | | | AC005257.1, AC003009.1, |
| | | | | | AC010148.13, AC005011.2, AL109935.39, AL049759.10, AP000901.5, |
| | | | | | AL354928.9, |
| | | | | | AC009144.5, AL163853.4, AL109805.14, AC009086.5, AC009996.7, |
| | | | | | AE000658.1, AC016898.6, |
| | | | | | AL590076.3, AC008543.7, AC005670.1, AL591770.1, AC007204.1, |
| | | | | | AC006251.3, AC009122.8, |
| | | | | | AL034550.31, AL136418.4, AL139054.1, AC006345.4, AC004821.3, |
| | | | | | AC011497.6, AC003006.1, |
| | | | | | AC004678.1, AL117351.12, AC000118.1, AL512430.14, AC008622.5, |
| | | | | | Z93023.1, AC008379.6, |
| | | | | | AC006435.7, AC006211.1, AF196779.1, AL357515.26, AL049776.3, |
| | | | | | AL133448.4, AC004675.1, |
| | | | | | AL137818.3, AL354720.14, AC079753.7, AP001619.1, AC044797.5, |
| | | | | | AC011236.8, AC020906.6, |
| | | | | | AC010422.7, AL050328.24, AL109921.21, AC005771.1, AC005234.1, |
| | | | | | AL136223.11, |
| | | | | | AL121928.13, AC000075.2, AL163279.2, AL050349.27, AC020558.4, |
| | | | | | AC005488.2, |
| | | | | | AC004997.2, AL450339.5, AC004876.2, AC005844.7, AL023575.1, |
| | | | | | AL121658.2, AC007683.5, |
| | | | | | AP000553.1, AC008745.6, AC009131.6, AC004596.1, AC004826.3, |
| | | | | | AL160163.24, AL031597.7, |
| | | | | | AB023049.1, AC016769.10, AC006064.9, AC005664.2, AB053170.1, |
| | | | | | AF001549.1, AL590964.8, |
| | | | | | AP001726.1, AC025593.5, AC018808.4, AC007052.4, AC007011.1, |
| | | | | | U95742.1, AL035422.12, |
| | | | | | AP001689.1, AL133477.16, AC004686.1, AL136304.10, AL050335.32, |
| | | | | | AL158830.17, |
| | | | | | AF196971.1, AL132642.4, AC004638.1, AL135927.14, AC007227.3, |
| | | | | | AL136300.22, AC005585.1, |
| | | | | | AL158159.14, AL118520.26, AL355094.3, AL445201.14, AC003007.1, |
| | | | | | AC002314.1, |
| | | | | | AC018828.3, AL139327.18, AC005632.2, AC007957.36, AC011472.7, |
| | | | | | AL445248.7, AP000302.1, |
| | | | | | AL078477.5, AL589947.3, AL022328.21, AC024561.4, AC003070.1, |
| | | | | | AC007298.17, U82671.3, |
| | | | | | AC008895.7, AC018751.30, AC012476.8, AF215937.1, AC003085.1, |
| | | | | | AC087071.2, AC005696.1, |
| | | | | | AP001216.3, AC009958.2, AC005839.1, AD000092.1, AC005682.2, |
| | | | | | AP000513.1, AL136126.34, |
| | | | | | AC011816.17, Z98200.8, AC005668.1, AL096791.12, AL162426.20, |
| | | | | | AL163249.2, AC023114.5, |
| | | | | | AC002470.17, AC005755.1, Z99129.1, AL035683.9, AC006128.1, |
| | | | | | AL354808.24, AC008039.1, |
| | | | | | AC004019.20, AC008079.23, AC005330.2, AL031255.1, U78027.1, |
| | | | | | AC010740.7, AE006467.1, |
| | | | | | AC003111.1, AL359513.12, AC004975.2, AC005377.2, AL121929.17, |
| | | | | | AC023669.8, |
| | | | | | AC007318.4, AC005520.2, AL136980.5, AC026464.6, AL121989.12, |
| | | | | | AC005081.3, AP000474.2, |
| | | | | | AL158210.12, AC011452.6, AC006487.8, AL034420.16, AL133367.4, |
| | | | | | AP001745.1, AP000555.1, |
| | | | | | AC016939.8, AC008687.4, AC007666.12, AC006468.9, AC006480.3, |
| | | | | | AL096841.6, |
| | | | | | AC005399.19, AC006132.1, AL034380.26, AC006312.8, AC017079.5, |
| | | | | | AL157372.18, |
| | | | | | AC021752.5, AF217796.1, AL035450.1, AP001688.1, AF279660.2, |
| | | | | | AC006130.1, AL133500.3, |
| | | | | | U91326.1, AL161756.6, AL021939.1, AL035458.35, AC005052.2, |
| | | | | | AC020915.6, AL445189.7, |
| | | | | | AC024166.3. |
| HDPSB18 | 67 | 1043263 | 1-3394 | 15-3408 | AA631915, AA595661, AI348780, AA489390, AA640305, |
| | | | | | BG231195, AW239465, AI523205, |
| | | | | | AA180056, AW975434, AI819419, AV759517, AA199578, |
| | | | | | BE677227, BF740656, AW839858, |
| | | | | | AI754064, BF880881, AI270280, AI567676, AA568303, |
| | | | | | AV706458, BE062357, AI753131, AW247955, |
| | | | | | AI610814, AA493546, AI086603, AV717475, BF875339, |
| | | | | | AL355512.22, AF207550.1, AF038458.1, |
| | | | | | AL109797.18, AL118520.26, AL590762.1, AC003101.1, AC004000.1, |
| | | | | | Z93023.1, AL121712.27, |
| | | | | | AL034549.19, AC072052.6, AL117692.5, AC020931.5, AP002852.3, |
| | | | | | AB023048.1, Z93928.1, |
| | | | | | AC005081.3, AF196779.1, AL133448.4, AP000116.1, AL121886.22, |
| | | | | | AP001726.1, AC011461.4, |
| | | | | | AC005015.2, AC006013.3, AC011475.6, AP003352.2, AL121992.24, |
| | | | | | AC011491.5, AC020663.1, |
| | | | | | AC008569.6, AC022087.8, AC011495.6, AC010271.6, AC007546.5, |
| | | | | | AC004812.1, AL139100.9, |
| | | | | | AC008745.6, AC079316.15, AC003043.1, AC003962.1, AL035072.16, |
| | | | | | AC010605.4, |
| | | | | | AC004522.1, AC007151.2, AL158830.17, AP001694.1, AC009220.10, |
| | | | | | AC009144.5, |
| | | | | | AL121574.19, Z98941.1, AL162426.20, AL356299.16, AL122035.6, |
| | | | | | AL009181.1, AL049569.13, |
| | | | | | AC074121.16, AL138976.5, AL034372.33, L78833.1, AL117336.22, |
| | | | | | AP001710.1, AC005913.2, |
| | | | | | AC006948.4, AC011446.6, AC016894.7, AP001725.1, AC002300.1, |
| | | | | | AF111167.2, AC005522.2, |
| | | | | | AC005488.2, AL137229.4, AC008891.7, AC008481.7, AC002470.17, |
| | | | | | AC011442.5, |
| | | | | | AC025165.27, AC005004.3, AC005067.2, AL391827.18, AC005377.2, |
| | | | | | AC005412.6, |
| | | | | | AP000501.1, Z93244.1, AL158040.13, AL445483.13, AC004967.3, |
| | | | | | AC006014.2, AL117258.4, |
| | | | | | AC008440.8, AC011811.42, AL139809.16, AC011497.6, Z97054.1, |
| | | | | | AL133367.4, AL022316.2, |
| | | | | | AC018809.4, AL132780.5, AP000692.1, AP000555.1, AC004150.8, |
| | | | | | AC010553.6, Z99716.4, |
| | | | | | AC005839.1, AP000892.4, AC009412.6, AP000744.4, AC005180.2, |
| | | | | | AL135978.4, AP000065.1, |
| | | | | | AC005098.2, AC004963.2, AC021016.4, AC024561.4, AL139396.17, |
| | | | | | AC018636.4, AC010543.8, |
| | | | | | Z93015.9, AL139415.10, AL138756.23, AC024952.4, AC010319.7, |
| | | | | | AC008806.4, AC010422.7, |
| | | | | | AL365444.11, AC008812.7, U80017.1, AL121891.22, AC000360.35, |
| | | | | | AL109743.4, AL096791.12, |
| | | | | | AL035086.12, AL132712.4, AC010463.6, AP000048.1, AL122001.32, |
| | | | | | AC004771.1, |
| | | | | | AC004019.20, AL135927.14, AC007227.3, AC027126.4, AC022384.4, |
| | | | | | AL024498.12, |
| | | | | | AC011465.4, AC004890.2, AL132768.15, AL049538.9, AC018751.30, |
| | | | | | AC007957.36, |
| | | | | | AC004821.3, AC010458.5, AL109825.23, AC040160.4, AC004125.1, |
| | | | | | AL109923.29, |
| | | | | | AC004526.1, AL161937.13, AC006330.5, AL033519.42, AC010598.6, |
| | | | | | AC008264.10, |
| | | | | | AC009137.6, AJ003147.1, AL008582.11, AL121601.13, AP001610.1, |
| | | | | | AL022721.1, AF217796.1, |
| | | | | | AL049795.20, AB000565.1, AC006449.19, AC019205.4, AL034420.16, |
| | | | | | AC007277.2, |
| | | | | | AL020997.1, AC009060.7, AC004887.2, AC008372.6, AL449305.4, |
| | | | | | AC007536.9, AC006057.5, |
| | | | | | AC005726.1, AL035460.15, AC011740.7, AC009756.9, AL161747.5, |
| | | | | | AC005581.1, |
| | | | | | AC004166.12, AL161670.4, AC083867.4, AL354932.26, AC003982.1, |
| | | | | | AC005527.3, |
| | | | | | AC011248.8, AC007216.2, AC020983.7, AC004878.2, AC005399.19, |
| | | | | | AC004638.1, |
| | | | | | AL359541.11, AC020913.6. |
| HDPSH53 | 68 | 1309174 | 1-1649 | 15-1663 | AU159990, AI307612, AW079047, AI334650, AW874319, |
| | | | | | AW139828, AI364431, BE242397, |
| | | | | | BF726322, BF724691, AI568870, AW268253, AI868831, |
| | | | | | AI433976, BF795712, BG058208, BF883916, |
| | | | | | AL119049, AL135661, AL513911, AW303152, AI567632, |
| | | | | | AL121270, BE047863, BF343172, AI673256, |
| | | | | | AI679724, BE048071, AL036146, BE785905, AI500553, |
| | | | | | AI349645, BG168696, AV682521, BG250190, |
| | | | | | BE964812, AI567351, AI349772, BF971016, BE964700, |
| | | | | | AW827203, AW235035, BG036846, AI863014, |
| | | | | | BF812933, AW162071, AI608667, AI436456, AL047042, |
| | | | | | AI064830, AI349933, AL046849, AI687376, |
| | | | | | AL515041, AI815383, AL513597, BE905408, AL513553, |
| | | | | | AL513907, AL514919, AL514803, |
| | | | | | AW071349, AI500077, AI702406, AL047763, AW999049, |
| | | | | | BG179993, AL036396, BG107847, |
| | | | | | AI690751, AL045500, AI433157, BG252929, BE877769, |
| | | | | | BE048179, AL119791, BE965556, AV755290, |
| | | | | | BF054789, AI687728, BF673434, AV682809, BF344652, |
| | | | | | AV704928, AI538716, AL513741, AV681872, |
| | | | | | AV682289, AV682266, BF981774, AV727776, BE966388, |
| | | | | | AV682249, AW089572, AI873731, |
| | | | | | BE048081, AL036759, BG033403, BG151247, AL514627, |
| | | | | | AV710608, BG178809, AV655645, |
| | | | | | AV682672, BF793644, AI440426, AL120736, AW117882, |
| | | | | | AL121365, AI969567, AI281779, BG259801, |
| | | | | | AV733819, AW827211, AL515173, AI349256, AL036802, |
| | | | | | BE018711, AV762488, BG108324, |
| | | | | | BF968493, BG260037, AV755581, AI687362, AL119748, |
| | | | | | AI312152, BG257535, AV756067, AI889203, |
| | | | | | AI349937, BG029399, BG180996, AI686926, AL513693, |
| | | | | | BE887488, BF817392, AL513803, AW103371, |
| | | | | | BF036115, AV758668, AV732941, AV711509, BF342709, |
| | | | | | BF726297, AW195957, AV681647, |
| | | | | | BF968041, BG108147, BF726001, BE967113, AI521012, |
| | | | | | AW238730, AI349004, AV757797, AL513837, |
| | | | | | AV682466, AI366549, AV726951, BE777769, AV723953, |
| | | | | | BG112879, AV681759, AW074993, |
| | | | | | AA640779, AI343112, AL036980, AA613907, BG109270, |
| | | | | | AI340582, BE781369, BG179633, BE048135, |
| | | | | | BE048163, BF037097, BG121222, AV758822, BG027204, |
| | | | | | AV758592, AV682479, BE968552, |
| | | | | | AV757455, BE880190, AI690835, BE963035, AI920968, |
| | | | | | AI818683, AI499393, BE047859, AV682267, |
| | | | | | AL120854, AV682082, AV758179, AV757012, AI934036, |
| | | | | | AL513753, AI282655, AI439087, AV758217, |
| | | | | | AV756477, AV682441, BE048026, AV681951, AV763915, |
| | | | | | AI678302, AI609592, BE048319, |
| | | | | | AV764059, AV706777, AV710479, AW301409, BF726421, |
| | | | | | AL529946, AI699857, AV682772, |
| | | | | | AI469532, AI207510, BE969709, AW467961, AV682792, |
| | | | | | AV717179, AV758806, AI969601, |
| | | | | | AV709517, AI349614, AL514791, AI866608, AV755311, |
| | | | | | BF340031, AV682330, AI580190, AV681857, |
| | | | | | AV711924, BE881155, AW166645, AI349598, AI906328, |
| | | | | | BG109125, BG114104, AV681668, |
| | | | | | BE613622, AV708119, AW274192, AV682333, BE964486, |
| | | | | | BG031815, AW080838, AV755613, |
| | | | | | AV660662, BE909549, AI597918, AF311287.1, AK024001.1, |
| | | | | | BC008877.1, BC008417.1, |
| | | | | | AL136586.1, AF078844.1, AL050393.1, AL389978.1, AF090934.1, |
| | | | | | AF125949.1, AL157431.1, |
| | | | | | BC008387.1, AL050146.1, AL442082.1, BC007021.1, AL390167.1, |
| | | | | | AL442072.1, AL133640.1, |
| | | | | | AL080060.1, AB056420.1, AL133016.1, BC008365.1, AB055303.1, |
| | | | | | AF090901.1, AJ242859.1, |
| | | | | | S78214.1, AF090943.1, AL117460.1, AL136787.1, AL512733.1, |
| | | | | | AF090900.1, AF090903.1, |
| | | | | | AK026608.1, AF104032.1, AB048953.1, AF218014.1, AB049758.1, |
| | | | | | AL137527.1, AL110196.1, |
| | | | | | AL117457.1, AL133606.1, AL049452.1, AL049938.1, AK000212.1, |
| | | | | | AL110221.1, BC008488.1, |
| | | | | | BC003687.1, AL359596.1, AL359601.1, AK026865.1, AF111847.1, |
| | | | | | BC003683.1, AB060916.1, |
| | | | | | AB048964.1, AB063046.1, AB047615.1, AB056809.1, AL136892.1, |
| | | | | | AL136789.1, AL050149.1, |
| | | | | | AF090896.1, AF219137.1, AB056768.1, AB063008.1, AB063070.1, |
| | | | | | AK026741.1, AL050116.1, |
| | | | | | AL050108.1, AL136749.1, AB047801.1, AL122050.1, AK025339.1, |
| | | | | | AL162083.1, U42766.1, |
| | | | | | AB050510.1, AB060887.1, AB019565.1, AK026045.1, AF106862.1, |
| | | | | | AL080124.1, AL133075.1, |
| | | | | | AL162006.1, AK025084.1, AL049466.1, AK027868.1, AB055361.1, |
| | | | | | AB060908.1, AL136799.1, |
| | | | | | AL049314.1, AL080137.1, AL137283.1, AK025958.1, AL122093.1, |
| | | | | | BC001967.1, AL096744.1, |
| | | | | | BC006807.1, Y16645.1, AL133557.1, AL050277.1, AK026855.1, |
| | | | | | AL049430.1, AL133093.1, |
| | | | | | AF091084.1, AL389982.1, AK026744.1, AL136844.1, AL136768.1, |
| | | | | | AK025772.1, AL122121.1, |
| | | | | | AL133565.1, AL133080.1, AK026533.1, BC002733.1, AL137557.1, |
| | | | | | AB060863.1, AL137459.1, |
| | | | | | AK000618.1, AL512746.1, AL122123.1, AF097996.1, AF207829.1, |
| | | | | | U91329.1, AF271350.1, |
| | | | | | AL512719.1, AL512754.1, AK027096.1, AB055368.1, AB060912.1, |
| | | | | | AK026784.1, X82434.1, |
| | | | | | AF146568.1, AB062938.1, AL512718.1, AL117394.1, AL050138.1, |
| | | | | | AF125948.1, AB060825.1, |
| | | | | | AK026452.1, AK000614.1, AL359941.1, AL359618.1, AK000137.1, |
| | | | | | BC004556.1, AL136928.1, |
| | | | | | AK026542.1, AL117583.1, AK000445.1, AK025092.1, BC06195.1, |
| | | | | | AB060826.1, AB051158.1, |
| | | | | | AL110225.1, AK000652.1, AB048954.1, AK000083.1, BC001045.1, |
| | | | | | AK026504.1, AP001873.3, |
| | | | | | AK026592.1, AK026480.1, AK026583.1, AK025491.1, AB055366.1, |
| | | | | | AL117585.1, AB048974.1, |
| | | | | | AL137550.1, AB052191.1, AL353940.1, AL049464.1, AK024538.1, |
| | | | | | AL133560.1, AF225424.1, |
| | | | | | AK026532.1, AB060852.1, AK026647.1, AF177336.1, AK026927.1, |
| | | | | | AB055315.1, AK026353.1, |
| | | | | | AL359615.1, AL049382.1, S61953.1, AC006371.2, AK027113.1, |
| | | | | | AK026534.1, AL512689.1, |
| | | | | | AB047904.1, AK026528.1, AL049300.1, AB063093.1, AC002467.1, |
| | | | | | AL133258.16, AL513015.6, |
| | | | | | AL117435.1, AL050024.1, AL136845.1, BC007199.1, BC008070.1, |
| | | | | | AF348209.1, AL353594.13, |
| | | | | | AK027204.1, AK026959.1, AK026086.1, AF061943.1, AL512761.1, |
| | | | | | AK026947.1, AL137463.1, |
| | | | | | AF091512.1, AC007390.3, BC002839.1, AK025414.1, AC007375.6, |
| | | | | | AK025391.1, AK025967.1, |
| | | | | | BC008485.1, AK027164.1, AL122098.1, AC004690.1, BC004951.1, |
| | | | | | AB052200.1, AK000323.1, |
| | | | | | AB049892.1, AL353802.14, AK026642.1, AL157482.1, BC008983.1, |
| | | | | | AK000432.1, AC022215.4, |
| | | | | | AK000647.1, AF183393.1, AK026651.1, BC008280.1, Z82022.1, |
| | | | | | BC008899.1, AK024524.1, |
| | | | | | AC006435.7, AL080127.1, AL133113.1, BC008382.1, AB060883.1, |
| | | | | | AC026787.4, AL049283.1, |
| | | | | | AF260566.1, AC009364.8, AB063084.1, AB056421.1, AL136786.1, |
| | | | | | AK025524.1. |
| HDPSP54 | 70 | 744440 | 1-3077 | 15-3091 | BG256849, BG261011, BG178729, BG110345, AI923220, |
| | | | | | BE466885, BF667257, AW271504, |
| | | | | | AW243442, BE466659, BG171469, AV661528, AW271637, |
| | | | | | AW516811, N36059, AI804888, BE882420, |
| | | | | | AI650826, BF815232, AW964507, AI921747, BE936373, |
| | | | | | BF984751, BG259707, AI392784, AW076096, |
| | | | | | AI807747, AW103424, AA604757, AA633209, AW778887, |
| | | | | | AW418987, AW242326, BE622192, |
| | | | | | BF666519, BF978796, AW014203, AI925261, BF853590, |
| | | | | | AW131363, AW514756, N33223, AI819108, |
| | | | | | AI126250, AV649748, AI953896, AV714556, AI524472, |
| | | | | | BF697124, BE218100, AW629098, N21567, |
| | | | | | AI694687, AI700209, AA731730, AA577191, BE219931, |
| | | | | | N33824, BE567212, AW778908, AW087660, |
| | | | | | AI990562, BF792681, R52426, AI559108, AA743389, |
| | | | | | N35579, N25189, N30972, BF667662, AI339587, |
| | | | | | N24947, AI376459, AA742979, N27426, R23308, |
| | | | | | AI125720, AA954281, AI801129, AW087669, |
| | | | | | AI701246, AI245517, T26975, BF572334, BE177998, |
| | | | | | BE564497, AI636147, AI640713, N41938, |
| | | | | | H97662, AI243263, BE967025, AI572028, BE543895, |
| | | | | | H29641, BE762905, BF246305, Z46022, H29640, |
| | | | | | BG223352, AI270534, AI983198, H99399, BF965116, |
| | | | | | BF692452, Z42169, AI521060, BF102948, |
| | | | | | R82562, AV646807, N34709, AV646406, R23233, |
| | | | | | AA373475, BE005657, AA319637, T34245, |
| | | | | | BG104469, W20047, AW962829, BF572695, AI369988, |
| | | | | | AI741908, BE830524, H29549, D78710, |
| | | | | | Z41637, H29548, AA833897, AI367191, AA659275, |
| | | | | | AW899997, F01708, BF697465, AI246035, |
| | | | | | AI219239, BF154447, AI221561, AI273738, AI281168, |
| | | | | | BE005723, BE170424, AI685342, BE882847, |
| | | | | | AB007962.1. |
| HDPUH26 | 71 | 866433 | 1-2902 | 15-2916 | AL525441, AL525265, AL528202, AW964372, BE747248, |
| | | | | | BE743063, BF793839, BE005995, |
| | | | | | BE870109, AV706482, BE645327, AV698161, BE272135, |
| | | | | | BE254341, AV704424, AV706294, |
| | | | | | AA772122, BG153419, AA777796, BE645332, AI743322, |
| | | | | | AV707082, AV706285, BF382272, |
| | | | | | BF514943, BE018051, BE673957, BE301907, BF114727, |
| | | | | | AW964371, BF530465, AA897780, AI890748, |
| | | | | | AI559637, AI688995, AW780354, BE206397, AW137052, |
| | | | | | N51699, AW103016, BF794314, AA528004, |
| | | | | | AW662431, AW085759, BF313538, AI765664, AI954974, |
| | | | | | AI570150, N20494, R87549, F31312, |
| | | | | | AI245467, AI991886, AA112198, BG170315, BG178458, |
| | | | | | AW273510, AI435207, AA004881, |
| | | | | | AW964399, AA005087, N25526, AW608346, F36783, |
| | | | | | AA587960, AI815015, AA454482, AW662721, |
| | | | | | AA318288, AW993077, N29111, AI247285, AA911896, |
| | | | | | AI766414, R91507, AI279757, BF313030, |
| | | | | | AW242248, AA707000, AI367676, AW139115, T16478, |
| | | | | | AW504841, W90115, R12114, T32805, |
| | | | | | AI675726, AA346284, BF765331, AW993187, AA317950, |
| | | | | | BE169534, BF692514, AW086086, |
| | | | | | AA186891, BF749263, BG013421, BF765334, R36868, |
| | | | | | AW769864, AW884956, AI972497, BE170268, |
| | | | | | C01229, AA348258, AI953592, F27014, AA599852, |
| | | | | | AI914300, N51791, BF676529, AI868860, T48372, |
| | | | | | AI824747, F30177, AI810802, AI263284, AW611772, |
| | | | | | AA188514, AA603987, T32655, AL528203, |
| | | | | | AI625886, BF874301, AI346660, AA903746, F35605, |
| | | | | | AW820935, AW577918, AK000303.1. |
| HDPUW68 | 72 | 812737 | 1-1734 | 15-1748 | AW295848, AI132995, T48851, AI247571, AW469884, |
| | | | | | AV734061, T48852, BE378325, AW571432, |
| | | | | | AA344713, AW131386, AU138048, AW190967, BF896891, |
| | | | | | AA400508, AA400618, AA835515, |
| | | | | | AF170485.1, AJ007395.1, AJ130710.1, AF193441.1, AJ130711.1, |
| | | | | | AF227924.1, AB026265.1, |
| | | | | | AF247180.1, AF178981.1, AF223403.1, AF195092.1, AC020914.7, |
| | | | | | AF277806.1, AC011473.4, |
| | | | | | AF135027.1, AF310234.1, AF287892.1, AC008750.7, AJ130712.1, |
| | | | | | AJ130713.1, D86359.1, |
| | | | | | D86358.1, U71382.1. |
| HDPWU34 | 73 | 630354 | 1-1263 | 15-1277 | BG054851, BF439942, AI141684, BG008949, BE677186, |
| | | | | | AA242853, AI281834, BF433831, N50984, |
| | | | | | AA826047, AW014432, AA977801, AW770255, AA984041, |
| | | | | | T64272, AA994205, AA252172, T64144, |
| | | | | | AI361098, BE146421, AW084330, AI280735, AA931748, |
| | | | | | AW071613, R09320, AA448980, AI990634, |
| | | | | | R09211, AW388104, AI147841, AI198101, AW517751, |
| | | | | | AW238793, BF969846, AI627898, AU156992, |
| | | | | | AW074546, AW072130, AI276023, AI457707, AI394689, |
| | | | | | AI953242, AI539262, BE907440, BF984530, |
| | | | | | AI886594, AA761557, AW082532, AI613471, AA947158, |
| | | | | | AI380329, AW079334, AI636788, D44958, |
| | | | | | AI568132, AI274769, AA150147, AI624304, BF828567, |
| | | | | | AI933785, AW248417, AL036548, AI934147, |
| | | | | | AI343038, AW302662, AI336506, AI254251, AW303238, |
| | | | | | BF054886, AW268290, AI318301, AI866691, |
| | | | | | AI627621, AW263569, BG028962, BF792115, AW073898, |
| | | | | | BE877316, AI805688, BE874060, AI554218, |
| | | | | | AI445620, AW151652, BF055737, AI335411, AL043084, |
| | | | | | AI537190, AI445812, AI890057, AI889133, |
| | | | | | AV709604, AV703599, AW050725, AI355779, AI537516, |
| | | | | | AW149876, AI679261, AL040011, |
| | | | | | AI690927, AV743631, AI539771, AI249877, AW152214, |
| | | | | | AI340570, AW411412, BG178911, AI926593, |
| | | | | | AW301381, AI888621, AI357599, BF911528, BF909758, |
| | | | | | AI677983, AA088789, AW129993, AI623797, |
| | | | | | AW055252, AI628188, AI539632, AI349017, AL037521, |
| | | | | | BE138941, AI696626, AI432237, AI349762, |
| | | | | | AI366985, AI802826, AI270039, AI824557, AI628325, |
| | | | | | AI582240, AI583578, AI308035, AW268060, |
| | | | | | AI627909, AA493923, AL039587, AW302973, AI282967, |
| | | | | | AL042981, AI625926, AI559863, AI580290, |
| | | | | | AI571699, AL038154, AI677797, AW302073, BG105342, |
| | | | | | BF816041, AW084097, BE967265, AI824503, |
| | | | | | BF913615, AA731026, AW083804, AA878532, AI678446, |
| | | | | | AI318254, AI951222, AW193841, |
| | | | | | BF816031, AI365256, AI446405, BE393551, BF817746, |
| | | | | | AI699154, AI285439, AI744243, F34309, |
| | | | | | AA555145, BE974031, AA580663, AW081343, AI819516, |
| | | | | | BE613727, AI799313, BF868927, AI309306, |
| | | | | | AW104141, BG107564, AI272116, AI433611, AI623388, |
| | | | | | AW025279, BF925370, BE294431, AI357191, |
| | | | | | AW131952, AW089327, N74355, AI963172, AI560806, |
| | | | | | AV742848, AI359725, AW020455, AI824360, |
| | | | | | AI801561, AI648502, AI783569, BF339548, AI859644, |
| | | | | | AV714391, AW151847, AI374827, AI866573, |
| | | | | | AA835966, AI499986, AI689463, BF751997, AI499960, |
| | | | | | AI636507, AI803749, AI886055, AI873638, |
| | | | | | AI378131, BF814357, BE875959, BG033220, AI682121, |
| | | | | | BE964645, BF726001, AI289791, BF924884, |
| | | | | | AW089844, AI819016, AW029216, AW970048, AI568138, |
| | | | | | AI345471, AI613422, AW080335, |
| | | | | | AI318609, AB020598.1, AC004126.1, AK023577.1, AK000546.1, |
| | | | | | AK000450.1, BC008673.1, |
| | | | | | U75370.1, AL133053.1, AL110171.1, AB048995.1, AF188698.1, |
| | | | | | BC003111.1, J05032.1, |
| | | | | | AJ296345.1, AK000344.1, AL023657.1, AL137286.1, BC006091.1, |
| | | | | | BC002455.1, AL122111.1, |
| | | | | | BC001675.1, AL031346.8, AK027204.1, S77771.1, AL137659.1, |
| | | | | | AK000718.1, BC000386.1, |
| | | | | | AK024570.1, AF151109.1, AL110158.1, AF369701.1, AL080159.1, |
| | | | | | AF285167.1, AL136979.16, |
| | | | | | U62966.1, AB060856.1, AL389935.1, AF040723.1, BC001349.1, |
| | | | | | BC002737.1, AL512718.1, |
| | | | | | AF012536.1, BC000217.1, AB060883.1, AB063008.1, AB049900.1, |
| | | | | | AB060916.1, AC023880.5, |
| | | | | | AC078878.20, AC021325.5, AC009484.3, BC009341.1, AK026624.1, |
| | | | | | AL389978.1, AF067420.1, |
| | | | | | BC002524.1, AL035407.15, AK027113.1, AK000137.1, U39656.1, |
| | | | | | BC005816.1, BC001293.1, |
| | | | | | BC004336.1, AL136792.1, AF239683.1, AB063074.1, BC004874.1, |
| | | | | | AL133565.1, BC004943.1, |
| | | | | | BC002978.1, AF038847.1, AL359583.1, BC003548.1, AL136586.1, |
| | | | | | AL512719.1, S76508.1, |
| | | | | | BC005002.1, BC005858.1, AL359600.1, AK026571.1, AL137536.1, |
| | | | | | AL137711.1, AF274348.1, |
| | | | | | AF274347.1, AL133014.1, Z49258.1, AL136984.20, BC004960.1, |
| | | | | | AK026408.1, BC001774.1, |
| | | | | | AL136850.1, BC008649.1, AF245044.1, BC008895.1, AL162003.1, |
| | | | | | AF162270.1, AL117626.1, |
| | | | | | BC007571.1, BC007517.1, BC003682.1, AL137574.1, AK026627.1, |
| | | | | | AK025015.1, BC005843.1, |
| | | | | | U00686.1, AF040751.1, AL136752.1, AL137641.1, X99226.1, |
| | | | | | AL161427.16, AL161628.9, |
| | | | | | AF090934.1, AF218005.1, X69819.1, AK024974.1, BC003569.1, |
| | | | | | AK026182.1, BC004431.1, |
| | | | | | AF090886.1, AK024747.1, BC007198.1, BC008078.1, BC002397.1, |
| | | | | | BC005402.1, BC009033.1, |
| | | | | | BC007417.1, AL136615.1, BC001328.1, AL133645.1, AL049382.1, |
| | | | | | BC006408.1, BC007355.1, |
| | | | | | AB047801.1, AK027105.1, AF205861.1, BC007534.1, AL137660.1, |
| | | | | | AF155827.1, BC006807.1, |
| | | | | | AC024247.4, AL080060.1, BC004117.1, BC000550.1, AB050411.1, |
| | | | | | AK027104.1, AF030165.1, |
| | | | | | AB050534.1, AB048914.1, L30117.1, AL049460.1, AK026793.1, |
| | | | | | BC000713.1, AK025541.1, |
| | | | | | AB060903.1, AK000753.1, S69510.1, BC009253.1, BC000054.1, |
| | | | | | BC002574.1, AF081197.1, |
| | | | | | AF081195.1, AC003032.1, AF095901.1, AL121828.17, AL355143.17, |
| | | | | | AL031732.8, |
| | | | | | AL353594.13, AL512454.6, AL135933.11, AL034417.14, AC010137.3, |
| | | | | | AC004822.1, |
| | | | | | AC004686.1, AL138704.12, AC010081.4, AC006994.4, BC008365.1, |
| | | | | | AL137463.1, BC000007.1, |
| | | | | | AL136799.1, AF111112.1, BC003410.1, AL359941.1, D83989.1, |
| | | | | | BC003687.1, Y14040.1, |
| | | | | | AL133070.1, X83544.1, AB048913.1, AK026642.1, AJ299431.1, |
| | | | | | AK000636.1, AK025407.1, |
| | | | | | AL157479.1, BC008485.1, AL122098.1, AC008507.8, BC007522.1, |
| | | | | | AL359623.1, AF044323.1, |
| | | | | | AB056768.1, AB062978.1, AL049452.1, AF104032.1, AF348209.1, |
| | | | | | AL034400.2, AL353625.5, |
| | | | | | AK024622.1, BC008185.1, BC001418.2, AF026816.2, AK026464.1, |
| | | | | | BC004950.1, BC001236.1, |
| | | | | | BC002373.1, AF217966.1, BC006508.1, AL389983.1, BC001785.1, |
| | | | | | BC006164.1, BC008040.1, |
| | | | | | BC004513.1, BC006180.1, M86826.1, BC009272.1, AK026452.1, |
| | | | | | AK025524.1, AL133016.1, |
| | | | | | BC001336.1, AL122118.1, AB047627.1, M64936.1, AF098162.1, |
| | | | | | BC008417.1, AC007748.2, |
| | | | | | AL353745.7, BC002911.1, BC004926.1, AF271350.1, BC002688.1, |
| | | | | | BC002399.1, BC006089.1, |
| | | | | | BC004297.1, AK026045.1, BC003110.1, AL353957.1, AF177336.1, |
| | | | | | AK026885.1, BC006410.1, |
| | | | | | AB063084.1. |
| HDPXY01 | 74 | 879048 | 1-752 | 15-766 | AW860154, AW860153, AW821875, BE869510, BF094022, |
| | | | | | BF337555, BF527692, AW845544, |
| | | | | | AW176604, BF734241, BF928740, BF360615, BE169703, |
| | | | | | AJ230819, BF734231, AL133649.1, |
| | | | | | AJ271791.1, AJ271790.1. |
| HDTBV77 | 75 | 785879 | 1-2167 | 15-2181 | BF689672, BE387282, BE898209, BE386984, AA393894, |
| | | | | | BE893192, W22615, AA134750, BG006306, |
| | | | | | AI769121, BG006608, AA808986, AA367857, AA344170, |
| | | | | | BG013403, BF368795, AA367892, |
| | | | | | AW605363, BG006302, BF932070, AW948496, AK027375.1, |
| | | | | | BC004282.1, AK027831.1, |
| | | | | | AK027849.1. |
| HDTDQ23 | 76 | 1306984 | 1-2193 | 15-2207 | AI872206, BF966561, AW513884, AI912340, BE856991, |
| | | | | | AI758821, AW337178, BE327923, |
| | | | | | AW004890, AI572080, BG109128, AW058001, BF342854, |
| | | | | | AW886887, BF967940, AW474823, |
| | | | | | BF337371, BF591084, AA775261, BG164538, AA831357, |
| | | | | | BE087219, AW074361, AI361820, |
| | | | | | BF696525, AI982775, BF793075, AI690445, AA581345, |
| | | | | | AU156793, AI917776, D20022, AA825538, |
| | | | | | BF382552, AI360561, AW439592, AI798286, AI140796, |
| | | | | | AI277190, AA100279, AA485257, AA835492, |
| | | | | | AI522238, AW517943, BG035022, AI015234, AA706811, |
| | | | | | AI469550, BF197859, AI689240, AW265061, |
| | | | | | AI744762, AW450726, AI884872, BE714642, BE138867, |
| | | | | | T34498, BF213985, AW769512, BE073192, |
| | | | | | AA122332, BE138831, BF090537, AI811224, BG167993, |
| | | | | | BE932894, BF980823, AI355770, AA092467, |
| | | | | | AI471817, BE904497, BE719958, AI702026, BE171537, |
| | | | | | BG166879, AI597962, BG180321, BE171499, |
| | | | | | BF914841, BF967213, BE932875, AI681670, AA089786, |
| | | | | | BE327680, BE219939, BF032916, AU136610, |
| | | | | | AI624976, AK001917.1, AF035606.1, U58773.1. |
| HE2DE47 | 77 | 619852 | 1-3519 | 15-3533 | AL517387, AL526769, AL526907, AL523193, AL523194, |
| | | | | | AL515001, AL515002, BG030741, |
| | | | | | BF980577, BE903049, BE729941, BG163644, BE966268, |
| | | | | | BE067770, BE613706, BE780216, AL138389, |
| | | | | | BF196312, BG177870, AI041824, BE902470, BE384275, |
| | | | | | AI123426, BE384622, BE298710, BE067771, |
| | | | | | BE298416, BE885382, AI432657, BF966758, BF979153, |
| | | | | | AI708574, AI814491, BF036235, BF437789, |
| | | | | | AI720253, AI201638, AW182430, BF692903, BE867186, |
| | | | | | AA911185, BE748929, AW189237, AI432659, |
| | | | | | BE223052, AI687145, BF382011, BE564813, BG036747, |
| | | | | | AI024779, BE268867, AW029376, BF028837, |
| | | | | | AI024507, AW880654, N47923, AA706430, AA563625, |
| | | | | | AW662575, BG111471, BE748409, AA232692, |
| | | | | | AA864782, AI016478, BF676114, AW966708, AW958178, |
| | | | | | AW513800, AA010686, AI376397, |
| | | | | | AI081671, AA976495, AW167417, N98819, AA648548, |
| | | | | | AI721089, BF574678, AA311869, BF331286, |
| | | | | | AW731669, BE166594, W73934, BF110011, BF247329, |
| | | | | | BF382964, AA718927, N66559, BE832805, |
| | | | | | AA679466, AI224843, AA972211, W72314, AA664363, |
| | | | | | AI218733, AI571934, AA703942, AI690284, |
| | | | | | AW629428, N93202, AI350756, W28597, AA251850, |
| | | | | | AA688326, AA659803, AA143217, AA626686, |
| | | | | | BE614598, H96804, AW008436, BE693652, AA071465, |
| | | | | | AI041197, AA196284, AA010687, AA199756, |
| | | | | | Z30115, AW275267, N79354, N29375, AW151589, |
| | | | | | BF900837, AA935300, AA836130, AW673688, |
| | | | | | AW978790, AA777494, AW090055, AI090119, AW468015, |
| | | | | | R52190, T57886, AI992225, AW303565, |
| | | | | | AI364081, C18513, H64124, AA761409, AW024044, |
| | | | | | AA988587, AW511332, AW009882, AA332452, |
| | | | | | AA126237, BF816114, AA587628, AW674842, AI654600, |
| | | | | | H28730, AW519184, AA722914, AA568222, |
| | | | | | AA766768, AA452758, AI660131, T80441, AA743252, |
| | | | | | AI301049, AI582560, AA354888, AI192985, |
| | | | | | AW881224, AA659807, AA111908, AA384439, AA550787, |
| | | | | | AW591943, AV737948, AI991751, |
| | | | | | AW881220, AA768293, BF836804, AL517386, AA452580, |
| | | | | | R52095, AW194374, AI734966, AI094526, |
| | | | | | AI368645, AI933697, R39012, AA641785, AW881273, |
| | | | | | AA731215, W93220, AW881163, BE832836, |
| | | | | | AI362123, AA306249, AI028585, F09225, AA251954, |
| | | | | | W38817, R77126, W99334, T90405, AA085837, |
| | | | | | AA302983, H16312, AV739270, T85557, AA126402, |
| | | | | | AA380638, AA729885, N69096, AI955495, |
| | | | | | R54396, H16372, W93221, AA196142, AA974211, |
| | | | | | AA609032, AA922821, AA234384, AV744357, |
| | | | | | AA295432, AV739678, T97675, AA470710, AW938060, |
| | | | | | N62386, F04755, AI696775, AA298259, |
| | | | | | AA298571, BF939879, AI760728, R77125, BF367979, |
| | | | | | AA376505, AA865813, AA298871, AA492599, |
| | | | | | AW673976, BG253501, AI933856, AA306725, AI363737, |
| | | | | | AA999867, R25590, AA360269, R26986, |
| | | | | | AW593198, AI024271, R53081, AA143216, BF797376, |
| | | | | | BE855704, BG230502, AA380483, |
| | | | | | BC002597.1, AF180473.1, AF113226.1, AK000662.1, AB049862.1, |
| | | | | | AF147398.1, AL137674.1, |
| | | | | | D17008.1, D17177.1, T57968, R54395, H64171, |
| | | | | | AA010441. |
| HE2NV57 | 78 | 740750 | 1-853 | 15-867 | C05927, R72949, AA327984, AC084730.2, AC016673.5, |
| | | | | | AC004929.2, AC016716.6, AC008066.4, |
| | | | | | AC003969.1, AC024082.6, AC002302.1, AC013246.13, AC011490.7, |
| | | | | | AL158064.16, |
| | | | | | AC084729.2, AC078851.4, Z98743.1, AC020610.6, AF195953.1, |
| | | | | | AC016910.5, AL359394.9, |
| | | | | | AC005227.2, AC003692.1, AC016776.6, AC002300.1, AL451107.6, |
| | | | | | AL157838.24, AL031737.2, |
| | | | | | AL050335.32, AC007690.11, AC004541.1, AL022401.1, AC018796.4, |
| | | | | | AL358913.4, AL008583.1, |
| | | | | | AC005868.1, AL133383.10, AC006070.1, AC006211.1, AL359680.4, |
| | | | | | AL158035.14, |
| | | | | | AC087072.2, AC009424.2, AL391686.10, AP001684.1, AC006013.3, |
| | | | | | AL356461.15, AC016598.5, |
| | | | | | AP002980.2, AL158817.11, AL035685.21, AC034251.5, AC006134.1, |
| | | | | | AC020906.6, |
| | | | | | AL391241.21, AC015983.7, AP003470.2, AP001889.4, AL357519.19, |
| | | | | | AC087430.2, AC005081.3, |
| | | | | | AC005886.2, AC018509.5, AF277315.3, AC010913.9, AB020875.1, |
| | | | | | AJ011930.1, AL163300.2, |
| | | | | | AP000952.2, AL133387.8, AP000953.2, AL162503.12, AC025765.5, |
| | | | | | AP002342.3, AL445232.5, |
| | | | | | AC023114.5, AC004891.1, AL355792.8, AL163280.2, AL109662.3, |
| | | | | | AC010206.8, AL049843.18, |
| | | | | | AC017076.14, AC009362.8, AC005015.2, AL096791.12, AC002487.1, |
| | | | | | AC010726.4, |
| | | | | | AL353752.6, AP002846.2, AC005344.1, AC022363.24, AC009498.3, |
| | | | | | AP001699.1, AL138976.5, |
| | | | | | AC008064.2, AL357507.9, AP001670.1, AL137061.12. |
| HE2PH36 | 79 | 570903 | 1-1544 | 15-1558 | AA329666, AA664883, AL133353.6. |
| HE8DS15 | 80 | 847060 | 1-2185 | 15-2199 | AV725650, BE161426, AW130367, BF343057, AA127680, |
| | | | | | BF575221, AI096437, BF941499, W58383, |
| | | | | | AI161240, N95226, AW966449, AI356752, AI093508, |
| | | | | | AI057144, AA044288, AW130361, AI423547, |
| | | | | | AI221152, AI094774, H47283, AI352542, AI891136, |
| | | | | | AI002491, T53270, AA044116, R48378, R24320, |
| | | | | | AV658066, AI829703, AI819388, BE140169, Z44849, |
| | | | | | R16574, T39273, AA095159, Z25099, |
| | | | | | AW273857, R16633, AA384077, AI245095, AW026140, |
| | | | | | T93764, BE927909, N73937, AW118768, |
| | | | | | AA121543, AA995178, AI453845, AA703455, AI452494, |
| | | | | | AW044037, H40993, R48277, AW629019, |
| | | | | | T64039, AA904647, AW073189, W21055, AW263913, |
| | | | | | AI096938, Z28777, W03697, AW797518, |
| | | | | | AI039546, AI434419, AW050649, BG003285, AI240412, |
| | | | | | AA886341, H23905, AI695284, AI767991, |
| | | | | | H47284, AI309041, BE927916, AA724059, AI352281, |
| | | | | | AI584012, AA618131, AA357401, AI796309, |
| | | | | | BE936061, AB018301.1, AL096772.5. |
| HE9CO69 | 81 | 596829 | 1-1063 | 15-1077 | AL517134, AL537534, BG120134, AI361222, AI361218, |
| | | | | | BG168891, AI818146, AW955091, AL044002, |
| | | | | | AV719782, AW510853, BF699219, AI937067, BF216510, |
| | | | | | BE927666, AW292803, BF335422, |
| | | | | | BE549610, BE927669, BF680792, BE881703, AW444975, |
| | | | | | BF085414, AI809804, BF674861, AA643669, |
| | | | | | AL044003, BF085327, AW571754, AI870371, AI333293, |
| | | | | | AW804029, BF367442, AI027392, BE825418, |
| | | | | | AW804094, BE814966, BE004566, AW804040, BE814989, |
| | | | | | AW804038, BE178594, BE814978, |
| | | | | | BE694316, AW804031, BE815035, AW804096, AW935907, |
| | | | | | N51364, W52337, AI140675, AI159864, |
| | | | | | BE178632, AI949007, AA449305, AI279860, BE927615, |
| | | | | | AI912517, AI056498, N66531, BF085618, |
| | | | | | AI344560, AI571128, AW887696, AA448734, AI937064, |
| | | | | | AA908864, BG150261, AA620750, |
| | | | | | BF085472, BE004562, BF197164, BF689123, AW102597, |
| | | | | | AL524051, BG150351, AA515676, |
| | | | | | AA845306, BE178588, BF433188, AA084404, AA448757, |
| | | | | | AI825137, BE178649, H12900, AI356775, |
| | | | | | BG167519, AA523074, AV756035, W49814, AW189236, |
| | | | | | AA448798, BF516003, H99378, AI313393, |
| | | | | | D82523, AW804120, AL517135, N89941, AI830723, |
| | | | | | AW887703, AW887694, N57002, BF085413, |
| | | | | | AI348377, AI423892, BE004603, AW887709, AA961085, |
| | | | | | BF085333, AI380140, AI423619, AA772080, |
| | | | | | D82499, AI244153, D60492, N64261, AI225085, |
| | | | | | BE089349, AA907447, BE089348, AW001668, |
| | | | | | BE825346, BF352382, BE089337, BE815028, AI289220, |
| | | | | | AW241615, AW052165, BG168918, R48783, |
| | | | | | BE814984, AI767167, AW472798, BE815055, AI423765, |
| | | | | | H00809, D57482, BF327548, R17701, |
| | | | | | R16274, R15770, AW024854, R28195, D82446, |
| | | | | | N88488, F09950, AI655533, H08546, Z30216, T30774, |
| | | | | | H12901, BF327564, BF037045, D82493, C02460, |
| | | | | | R28196, D57590, AW089369, BF111213, BF668534, |
| | | | | | T95086, BF437738, BF677346, D82563, BF327550, |
| | | | | | R38734, AI268405, AW440038, BE004951, |
| | | | | | T34027, W33131, H16803, BE004551, R56288, |
| | | | | | BF691993, BE927656, BE004811, D82528, AL532423, |
| | | | | | AV725074, D54250, BE927693, T95183, D82529, |
| | | | | | AL537535, T11295, W31584, W32076, R48890, |
| | | | | | BF688163, W33132, BE815060, BE004800, AW804018, |
| | | | | | BE004907, BE004864, AW804090, C02521, |
| | | | | | AW887690, AI674883, BE815026, BE004960, BE856297, |
| | | | | | BF327561, AW954918, BE868208, |
| | | | | | BE178643, BE004763, AA449562, AL515196, BE004560, |
| | | | | | BE089347, BC003074.1, BC005959.1, |
| | | | | | AC006033.2. |
| HEEAG23 | 84 | 684254 | 1-1655 | 15-1669 | BF667852, AW798053, BG141339, AI279852, BG141348, |
| | | | | | H57654, AI472339, H85172, BF879975, |
| | | | | | BF879989, BF879974, AW954063, AW994019, BF590284, |
| | | | | | AA383569, H96534, BF800241, AA903404, |
| | | | | | AW873530, AA719530, AI084916, AW135894, AA993772, |
| | | | | | BF358415, AA890589, BG249829, |
| | | | | | W61170, AA807443, AW498471, AA814409, BG149771, |
| | | | | | AI828884, BE839816, BF954921, R76166, |
| | | | | | BE545018, AA470533, BF922076, AI829062, BE766575, |
| | | | | | BF808213, AA737653, H96878, R62923, |
| | | | | | AA714658, BF808212, AA705115, AI964064, AA569749, |
| | | | | | AI343340, AC004938.2, AL357033.19, |
| | | | | | AL121808.4, AL135749.3, AL359402.3, AC009314.4, AL031777.4, |
| | | | | | AL035079.14, AC078818.19, |
| | | | | | AL358612.8, AC018644.6, AL391839.9, AC013716.6, AC004882.2, |
| | | | | | AL078591.18, AL078645.31, |
| | | | | | AL031680.20, AL162505.20, AP001715.1, AC025264.16, AL109938.8, |
| | | | | | AC006312.8, |
| | | | | | AF243527.1, AL133367.4, AC010319.7, AC083875.1, AL050349.27, |
| | | | | | AL162615.13, AL356575.8, |
| | | | | | AP000223.1, AL121578.1, AC084732.1, AC005033.1, AC005082.3, |
| | | | | | AL136162.17, AC027319.5, |
| | | | | | AC062020.5, AL157915.3, U63313.1, AC006511.5, AC011443.6, |
| | | | | | AP001687.1, AC004477.1, |
| | | | | | AC011508.4, AC083866.2, AC006315.2, Z84572.1, AL136131.15, |
| | | | | | AC011005.7, AP001429.2, |
| | | | | | AL035462.21, Z83823.1, AC002350.1, AL138820.11, AC020896.5, |
| | | | | | AC010206.8, AC011495.6, |
| | | | | | D83253.1, AC004151.1, AC008813.6, AC005291.1, AL354696.11, |
| | | | | | AC005225.2, AC004652.1, |
| | | | | | AC083810.16, AL390071.9, AL021940.1, AP002907.2, AP000962.2, |
| | | | | | AL031721.1, AL031666.6, |
| | | | | | AL353807.18, AC004167.1, AL009183.10, AL356095.11, U78027.1, |
| | | | | | AC018763.5, AL021393.1, |
| | | | | | AL391114.12, AL121928.13, AC068799.14, AC004223.1, AC004846.2, |
| | | | | | AC002400.1, |
| | | | | | AC004867.5, AF141309.1, AC006101.3, AL390298.13, AL136297.3, |
| | | | | | AL035422.12, |
| | | | | | AL022100.13, AL355593.21, AC010374.5, AC011485.6, AL049643.12, |
| | | | | | AC008886.5, |
| | | | | | AC020916.7, AC005694.3, AL139385.12, AC003006.1, AL035659.22, |
| | | | | | AL022165.1, |
| | | | | | AC007066.4, AC022816.15, AC068312.4, AL133448.4, AL080243.21, |
| | | | | | AP000755.4, AC025430.5, |
| | | | | | AC011510.7, AC064878.9, AL139415.10, AL391137.11, AL356481.16, |
| | | | | | AC007561.4, |
| | | | | | AL133387.8, AC011900.6, AL137100.4, AC007014.1, AC067956.3, |
| | | | | | AL121712.27, AL121809.6, |
| | | | | | AL159191.4, AC069246.5, AC019171.4, AC004752.1, AL031427.15, |
| | | | | | Y18000.1, AC004832.3, |
| | | | | | AC066589.3, AC003065.1, AC073115.5, AC006028.3, AL353746.6, |
| | | | | | AC005800.1, AC090885.1, |
| | | | | | AC006515.7, AP001284.5, AC006011.2, AL035587.5, AC006017.2, |
| | | | | | AL121943.22, AP001698.1, |
| | | | | | AL445685.17, AC011477.5, AC018648.5, AL352979.4, AC016995.4, |
| | | | | | AC022401.3, AL133467.4, |
| | | | | | AL135978.4, AC004913.2, AC005387.1, AP000045.1, AL138707.10, |
| | | | | | AC023105.7, AC002039.1, |
| | | | | | AC018755.3, AC023137.5, AL117258.4, AC004076.1, AL513131.1, |
| | | | | | AC008844.5, AC018636.4, |
| | | | | | AL353657.26, AL031228.1, AL450344.4, AC006319.3, AD000092.1, |
| | | | | | AL157789.6, AC006049.1, |
| | | | | | AC011461.4, AL133284.13, AL121934.17, AL022316.2, AC008392.6, |
| | | | | | AC010677.4, |
| | | | | | AC006205.7, Z82244.1, AL139388.4, AL139322.13, AC012476.8, |
| | | | | | AC022415.5, AC068976.5, |
| | | | | | AC005393.1, AC006057.5, AC007324.55, AC020904.6, AC026464.6, |
| | | | | | AP001692.1, AP001724.1, |
| | | | | | AL139317.5, AC007003.4, AC009779.18, AP000963.2, AP000228.1, |
| | | | | | AC007919.18, AL499628.1, |
| | | | | | AC007051.3, AC010422.7, AC011718.2, AC006127.1, AL135927.14, |
| | | | | | AC007227.3, AC005696.1, |
| | | | | | AC004754.1, AL359236.4, AC026753.5, AC004534.1, AL356414.11, |
| | | | | | Z86090.10, AF107885.2, |
| | | | | | AP000547.1, AC010530.7, AC020740.5, AL162426.20, AC005488.2, |
| | | | | | AL034372.33, AP000689.1, |
| | | | | | AC037492.5, AL035409.15, AC005037.2, AL049793.4, Z97196.1, |
| | | | | | AP000140.1, AC009743.1, |
| | | | | | AP000359.1, AP000088.1, AL357312.8, AL590682.9, AA252707, |
| | | | | | AA252834. |
| HEOMQ63 | 85 | 603533 | 1-1322 | 15-1336 | BG026315, AW102828, AI659843, BE551400, AI640582, |
| | | | | | BE208434, BF510823, AW955647, |
| | | | | | BE669917, AA789132, AA923523, W44769, AI346827, |
| | | | | | AI092608, BE267189, AW450220, AI350733, |
| | | | | | AW090676, AA830093, N98535, N69933, BF694104, |
| | | | | | AI000893, AI379944, AW968025, AA252680, |
| | | | | | AI202595, N32022, AL522177, AI026801, BF514413, |
| | | | | | AA075433, BG014214, AW452208, BE694426, |
| | | | | | BG171349, AI335272, AI634906, BE796712, AA846518, |
| | | | | | AA954350, AL522176, AI863776, BE265224, |
| | | | | | BF359220, BF359223, AW386074, BG112515, AV662306, |
| | | | | | AA973539, AA329532, F22685, AW136310, |
| | | | | | N28654, BG014217, AA610002, BG014216, C02160, |
| | | | | | W37089, N51549, AA361150, BC005984.1, |
| | | | | | AL109657.8, AL161659.17, AK025977.1. |
| HEPAB80 | 86 | 1307790 | 1-785 | 15-799 | AW274007, AI677890, AW510786, AW468943, AA335322, |
| | | | | | AI807924, AW172560, AC006116.1, |
| | | | | | AC011506.3. |
| HFABG18 | 87 | 847073 | 1-1331 | 15-1345 | BF570393, BF569907, BF344166, AA758023, W63573, |
| | | | | | AA877107, AW664584, AI924890, BE207784, |
| | | | | | AI422142, AI811174, AI891097, AI379416, AA631138, |
| | | | | | AI129321, AA233722, AA861574, AI339443, |
| | | | | | AW009533, AA635649, AA910314, BF510307, AA948287, |
| | | | | | AA421401, AA621181, H52254, |
| | | | | | AA908447, BF127938, AA330666, AA458586, AA328941, |
| | | | | | AI472877, BF337899, AA853185, R69866, |
| | | | | | AA852144, BF999691, T49327, AA677036, AW024548, |
| | | | | | R46515, R69911, BF999694, AW593365, |
| | | | | | H52351, AA976306, BF903330, T49326, AA233143, |
| | | | | | AI381786, BE827715, AA359077, AI569251, |
| | | | | | AI685425, AI826541. |
| HFABH95 | 88 | 566712 | 1-1333 | 15-1347 | BF035708, AI431513, AA832175, AI251429, AV729905, |
| | | | | | AV754716, AI538491, AU122466, AI446474, |
| | | | | | AC005006.2, AC008747.5, AC008805.7, AL160155.19, AC005081.3, |
| | | | | | AC013751.6, AC006241.1, |
| | | | | | AC004216.1, AL137853.12, AC069285.8, AL590762.1, AC004491.1, |
| | | | | | AL035659.22, |
| | | | | | AL158040.13, AL022323.7, AL160411.25, AC005231.2, AC005952.1, |
| | | | | | AC008649.6, |
| | | | | | AC002059.3, AL355480.22, AC007850.29, AC024163.2, AP000501.1, |
| | | | | | Z98304.1, AL122035.6, |
| | | | | | AC008569.6, AL360227.17, AP000694.1, AC005480.3, AC009470.4, |
| | | | | | AC008392.6, AC011464.5, |
| | | | | | AC005911.6, AC008440.8, AC013734.4, AL034417.14, AL139082.18, |
| | | | | | AC005242.1, AP000511.1, |
| | | | | | AC008403.6, AC040160.4, AL353653.19, AP001725.1, AL049776.3, |
| | | | | | AC004148.1, AC007686.5, |
| | | | | | Z98946.15, AC007374.6, AL137787.11, AC000159.6, AL109984.14, |
| | | | | | AC002350.1, AC009087.4, |
| | | | | | AP000351.3, AF240786.1, AC005037.2, AC011490.7, AL022238.1, |
| | | | | | AC006101.3, AL356481.16, |
| | | | | | AC005971.5, AC010458.5, AC025588.1, AC005072.2, AL359091.10, |
| | | | | | AC008521.5, AC016831.1, |
| | | | | | AL117330.6, AC006312.8, AC007055.3, AC024561.4, Z83826.12, |
| | | | | | AF196969.1, AC002300.1, |
| | | | | | AL121891.22, AC005594.1, AC010319.7, AL022322.1, AL513008.14, |
| | | | | | AC008623.4, Z83838.2, |
| | | | | | AC005972.1, AC006084.1, AL117694.5, AC008119.6, AP001711.1, |
| | | | | | AC005102.1, AC004840.3, |
| | | | | | AL133174.15, AP002453.3, Z83844.5. |
| HFAEF57 | 89 | 534142 | 1-628 | 15-642 | AV655597, AW967329, AW963498, AV706016, AW966767, |
| | | | | | AL121984.14. |
| HFCEB37 | 90 | 411345 | 1-788 | 15-802 | AW971191, BE710287, AA493766, D56115, H06701, |
| | | | | | Z41729, AA285136, AA256963, F04210, |
| | | | | | AL118652, AW893768, AW893769, AW160783, AF258348.1, |
| | | | | | AC007552.4, AL050152.1. |
| HFFAD59 | 91 | 520369 | 1-456 | 15-470 | AV699250, AV662248, AV699269, AV719565. |
| HFGAD82 | 92 | 513669 | 1-1867 | 15-1881 | AL119979, BF346635, AV726399, BF035097, AV727342, |
| | | | | | AL119977, BF920864, AW888751, N31682, |
| | | | | | AW148844, AA772781, AA326677, N23200, AW961610, |
| | | | | | BF976989, BE765872, BE765750, BE765749, |
| | | | | | BE765443, BF570590, BE765618, BF438771, BE766953, |
| | | | | | BE766490, F06586, BG057153, R60278, |
| | | | | | F07047, AA628815, AV722183, R16237, BF364146, |
| | | | | | AA204942, AV734361, N71200, AI000462, |
| | | | | | R54067, Z40722, BF337123, R54066, AW903171, |
| | | | | | H24278, AV726415, H16893, AW897545, H16783, |
| | | | | | H22887, R16238, F03521, R42035, F05678, |
| | | | | | T80483, AA321847, AV731162, AV731097, AV730504, |
| | | | | | AV730299, AV731130, BE763530, R20855, AA386266, |
| | | | | | AW890775, R45969, R42611, N94832, R39831, |
| | | | | | F02857, F03323, T03048, R11992, F07675, |
| | | | | | AU118413, AW890773, AA640468, N95708, F05679, |
| | | | | | BE830656, BF948144, M85660, AL119687, T08757, |
| | | | | | AV722325, AW904904, BF344999, AI003266, |
| | | | | | N76471, N47227, AW903272, BF977690, T53097, |
| | | | | | BF918689, F01937, N58994, AI000789, AW898733, |
| | | | | | BE702498, BE699153, AL118827, BE708346, F07242, |
| | | | | | AW897547, F01938, N51309, AC003037.1, |
| | | | | | AC022486.4, AC007379.2, AC007064.27, AC006548.20, AC016752.2, |
| | | | | | AC008175.2, |
| | | | | | AC007965.3, AC007322.4, T66696, T66697. |
| HFIIN69 | 93 | 1011487 | 1-1436 | 15-1450 | AA448034, AA602540, AA719535, AC018927.6, AC022007.3, |
| | | | | | AC018809.4, AC007546.5, |
| | | | | | AC002470.17, AB020872.1, AL035404.20, AL009181.1, AC005102.1, |
| | | | | | AC007686.5, |
| | | | | | AC007207.22, AC018808.4, AL109758.2, AL049759.10, AC007308.13, |
| | | | | | AC002301.1, AC007192.1. |
| HFIUR10 | 94 | 532060 | 1-527 | 15-541 | BF195618, AA191239, AW969824, AA009856, AW019964, |
| | | | | | AA808036, BE677291, AW973259, |
| | | | | | AW023662, AV742957, AU146063, AI369580, BG109444, |
| | | | | | AU153717, AV709074, BG032605, |
| | | | | | AI357823, AW888719, AL110373, AI832009, AV708388, |
| | | | | | AV725797, BE150580, AA223512, |
| | | | | | AV734980, AA402529, AA595661, AW410201, AA683069, |
| | | | | | AA191418, AI144036, AW474168, |
| | | | | | BF681348, AI590458, AI590499, F08248, AW302048, |
| | | | | | AV760508, BE794962, AA665181, H07953, |
| | | | | | AW971071, AA654781, AV763410, AA749035, BF965290, |
| | | | | | AI609972, BF676985, AV708385, |
| | | | | | AW504485, AV762633, AW166808, AA282951, AI860535, |
| | | | | | AI792575, AA634889, AW302950, |
| | | | | | AL048060, AI254913, AW875172, AI281689, AA668587, |
| | | | | | AA084619, BF675051, AI354423, AA832077, |
| | | | | | AI733129, BF674550, AL041924, BE139451, H73550, |
| | | | | | AA828853, N39953, AW863393, AV757526, |
| | | | | | AI859946, AW976008, AW023111, AA747234, AI565084, |
| | | | | | AV710482, AW814024, AV710045, |
| | | | | | AW963482, AI355246, AA814925, BE077105, AA653182, |
| | | | | | AA664521, AW440305, AI054397, |
| | | | | | AA651639, BF725761, AV758073, H15652, BE280771, |
| | | | | | AW438542, T74524, AW191063, BF940118, |
| | | | | | AW968205, AV762973, AA552578, BF965924, BF879045, |
| | | | | | AI251034, AI251203, AI251284, |
| | | | | | AW805539, BG236628, BE878259, AI250552, AA632556, |
| | | | | | BF809041, BG029224, BF868994, |
| | | | | | AW020736, AF236698, BE139139, AW271904, BF978025, |
| | | | | | BF681424, AU118374, AV758790, |
| | | | | | BG110480, AI803809, AV758097, AA574442, AV733434, |
| | | | | | BE155302, AA644664, AI792521, |
| | | | | | BE246472, BE901278, AA626825, AI686913, AV706237, |
| | | | | | BE155299, AW302293, AV702609, |
| | | | | | AA533123, BE968477, AV738383, BF814446, AI891080, |
| | | | | | AA516190, AA533040, AI284543, BE273825, |
| | | | | | AW779609, BF525663, AI380617, BF914419, AL079734, |
| | | | | | BG166965, AW069227, AL043351, |
| | | | | | AI267161, AV762870, AV658819, AV709273, AL042735, |
| | | | | | AA503018, AI973173, AL046746, |
| | | | | | BE062357, AI963705, T69857, AV730245, BF810071, |
| | | | | | AW301736, Z97987.1, AC020913.6, |
| | | | | | AL031281.6, AC007637.9, AL096757.1, Z93017.6, AC087225.1, |
| | | | | | Z83840.7, AC008073.4, |
| | | | | | AF245699.1, AC010349.7, AC087315.21, AL163011.3, AC004106.1, |
| | | | | | AC004132.1, AC008925.3, |
| | | | | | AC004990.1, AL133351.33, AC010618.7, AC006275.1, AL035405.10, |
| | | | | | AC034203.7, |
| | | | | | AC006930.1, AF156495.1, AC008754.8, AP001732.1, AL139824.22, |
| | | | | | AC003037.1, AP001646.4, |
| | | | | | AC005162.1, AL050341.18, AL034420.16, AC024075.4, AL117382.28, |
| | | | | | AC008521.5, |
| | | | | | AP001039.1, AL512378.7, AC005778.1, AC091394.2, AL132768.15, |
| | | | | | AL139385.12, |
| | | | | | AL049569.13, AL109914.16, Z95152.1, AL163541.13, AC006367.3, |
| | | | | | AL442203.12, AC005684.1, |
| | | | | | AL117377.18, AL109828.22, AL031681.16, AC007488.15, AC007425.16, |
| | | | | | AC018462.4, |
| | | | | | AC007934.7, AL078602.13, AC010002.6, AC005038.5, AC009743.1, |
| | | | | | AC006538.1, AC053467.1, |
| | | | | | Z95115.1, AP001922.4, AC010203.13, AC010150.3, AC006545.3, |
| | | | | | AC006546.9, AC004970.2, |
| | | | | | AP001696.1, AL390736.6, AC003035.1, AL355543.13, AC007318.4, |
| | | | | | AC007381.3, AC006253.4, |
| | | | | | AC022173.7, AC040160.4, AC003684.1, AC009331.5, AL109823.23, |
| | | | | | AL451107.6, |
| | | | | | AL359873.11, AC004605.1, AL035682.16, AP002453.3, AC063947.30, |
| | | | | | AC006270.1, |
| | | | | | AC016526.6, AC003664.1, AL078634.24, AL157897.7, AL009031.1, |
| | | | | | AL137802.7, AJ251973.1, |
| | | | | | AC002326.1, AL356421.10, AC006388.3, AC078846.2, AL138721.16, |
| | | | | | AC004103.1, |
| | | | | | AC090949.1, AC090944.1, AL139150.12, AL162423.18, AP001718.1, |
| | | | | | AL109915.10, |
| | | | | | AL390208.17, AC004616.1, AP002851.2, AC017100.4, AC022425.6, |
| | | | | | AC006080.1, AC005027.2, |
| | | | | | AC017006.4, AC024163.2, AL049540.11, AC005522.2, AP000353.2, |
| | | | | | AC008008.2, AL445205.14, |
| | | | | | AC078843.2, AC073864.28, AL161657.22, AL031280.6, AL035696.14, |
| | | | | | Z81364.1, AL157938.22, |
| | | | | | AC090426.1, AL389883.9, AL024474.1, AL138703.10, AC008266.3, |
| | | | | | AC073057.6, AL132800.4, |
| | | | | | AC007784.7, AC002996.1, AL354816.5, AC011449.6, AP000193.1, |
| | | | | | AL022313.1, AC008379.6, |
| | | | | | AP003355.2, AC005004.3, AC005514.1, AL118501.22, AL009028.1, |
| | | | | | Z86064.1, AP002812.3, |
| | | | | | AL035249.6, AC009131.6, AC002549.1, AC032011.14, AL109984.14, |
| | | | | | AF001549.1, Z84467.1, |
| | | | | | AL034419.22, AL512883.5, AC006204.1, AL353574.8, AC006960.1, |
| | | | | | AC009079.4, AC009503.3, |
| | | | | | D87009.1, AL354932.26, AC005014.1, AC005859.1, AL139110.17, |
| | | | | | AC003662.2, AL035089.21, |
| | | | | | AC005751.1, AL390738.4, AL133246.2, AP000694.1, AC020659.5, |
| | | | | | AL133355.12, AC004854.2, |
| | | | | | AL359236.4, AC006237.1, AK023233.1, Z85999.1, AL022323.7, |
| | | | | | AC003046.3, AL031730.1, |
| | | | | | AL160471.5, AL160071.16, AC010548.8, Z82206.1, AF029308.1, |
| | | | | | AC005498.1, AL133342.14, |
| | | | | | AP000348.1, AC011465.4, AC004812.1, AC007221.2, AL022316.2, |
| | | | | | AL035072.16, Z97630.11, |
| | | | | | AF312032.1, AC008551.5, AC007685.2, AC005034.1, AL391602.6, |
| | | | | | AC005220.1, AP000117.1, |
| | | | | | AL023883.6, AP001150.4, AL109825.23, AL137782.9, AL096800.20, |
| | | | | | AF252279.1, AC005695.1, |
| | | | | | AC016993.4, AC007620.30, AL022237.1, AC006481.3, AC018812.5, |
| | | | | | AL035420.15, |
| | | | | | AC004611.1, Z84487.2, AC018719.4, AC010163.7, AL133344.28, |
| | | | | | AC011290.3, AC007292.1, |
| | | | | | AC011895.4, AP001929.4, U63721.1, AC002352.1, AC011444.5, |
| | | | | | AC005327.1, AL451075.15, |
| | | | | | AC004595.1, AL138720.19, AL451185.14, AC002470.17, AL008732.1, |
| | | | | | AC006460.3, |
| | | | | | AL137119.26, AC005786.1, AC006211.1, AF134726.1, AC010205.5, |
| | | | | | U52112.1, AC007597.3, |
| | | | | | AC016026.13, AC005215.1. |
| HFKFG02 | 95 | 634743 | 1-781 | 15-795 | BE222940, AI479528, AW242860, R46796, M62053, |
| | | | | | AI017670, BE048467, AI671740, AW001738, |
| | | | | | AA351031, AI206414, AF124373.1, AB009698.1, AF104038.1, |
| | | | | | AB009697.1, AF057039.2, |
| | | | | | AP001858.4, AJ249369.1, AF097490.1, AJ251529.1, AJ271205.1. |
| HFTBM50 | 96 | 545012 | 1-748 | 15-762 | AL529436, BG254023, AA069656, AW512689, AA928735, |
| | | | | | BE901109, AL529437, BE074967, |
| | | | | | BE074973, AA423996, AI027673, AI130940, AA827360, |
| | | | | | AA424006, AA421599, AW602733, |
| | | | | | AI580837, AL526924, AA114876, AA576953, AI858981, |
| | | | | | BF222157, AL526960, BF542049, AA136831, |
| | | | | | AI200715, AI358322, AA988755, AW602739, AA187921, |
| | | | | | AL527090, H10340, AI499041, H10044, |
| | | | | | AA252300, AA188494, AA856927, R44331, AA588683, |
| | | | | | AW364266, BE092940, BE007334, R51006, |
| | | | | | AI253378, AA481649, AI686745, AI628242, BE092920, |
| | | | | | BF733881, AA729977, BF026424, AW804569, |
| | | | | | AA421594, AW994967, AA481416, BE733257, BF876214, |
| | | | | | AA679567, AW028221, AU134538, |
| | | | | | BE251492, BE729280, AI906091, BC002480.1, AK023414.1, |
| | | | | | AP002347.3. |
| HFTDZ36 | 97 | 545726 | 1-1089 | 15-1103 | AV721599, BF732420, BF510533, BF508158, BF508241, |
| | | | | | AI638188, AW181935, AI758929, |
| | | | | | AW592730, BE967495, AA447514, AI078837, AV723652, |
| | | | | | AI218418, BF692673, AA884756, AI335250, |
| | | | | | AW118870, BE044339, AA426363, AV730822, AI868197, |
| | | | | | BF947599, AA927228, BF952754, |
| | | | | | BF952302, BF952504, AW905268, AW905266, BF952591, |
| | | | | | AI673798, BF952850, BF952505, |
| | | | | | AW905263, BF952750, BF952589, BF952851, BF952752, |
| | | | | | AA897687, BF572515, AW905328, |
| | | | | | BE699539, AI830527, BF952755, BF210822, AA431528, |
| | | | | | AA029326, H41714, AA437157, N53641, |
| | | | | | BE699547, AW905379, BE699537, BE796741, AW898982, |
| | | | | | AI218421, AF289076.2, AC067967.2. |
| HFXBL33 | 98 | 778070 | 1-1619 | 15-1633 | BG141322, AV652809, AV662223, AV699247, AV699167, |
| | | | | | AV662247, AW963961, AV699098, |
| | | | | | AV662272, AV725496, AV727824, AV699218, AV719825, |
| | | | | | AV719156, AV699200, AW952432, |
| | | | | | AV720062, AV720893, AV653163, AV650903. |
| HFXHK73 | 99 | 609826 | 1-1859 | 15-1873 | AP001741.1, Z49918.1, AP001610.1, AC009399.5. |
| HFXJX44 | 100 | 701988 | 1-1370 | 15-1384 | AC004491.1, AC024579.4, AL136084.11, AC016564.5, AC005015.2, |
| | | | | | AC007011.1. |
| HFXKY27 | 101 | 634161 | 1-931 | 15-945 | AA483223, AA552843, AV762050, BF991286, AA623002, |
| | | | | | BF827410, AW193265, AI434706, |
| | | | | | AV759204, BE350475, AI270117, AV760937, BF217299, |
| | | | | | AV710066, AA610493, AI350211, AL041690, |
| | | | | | BF475381, AV764241, AV764307, AW673241, AV762139, |
| | | | | | AI192631, AA552856, AV763540, |
| | | | | | BF676536, AA468131, AV682003, AI368256, AI345157, |
| | | | | | AA649705, AI345518, AV760774, AA480772, |
| | | | | | AA521323, AI538433, AA644538, AL037683, AA577906, |
| | | | | | AA613227, AA503475, AW270382, |
| | | | | | AI355206, AW021583, AV759274, AA521399, AV761155, |
| | | | | | AA492166, AV735495, AI431303, |
| | | | | | AA490183, AW088846, AF330238, AA857486, AA493621, |
| | | | | | AV759382, AW438643, AA579362, |
| | | | | | AI610159, AA525790, AA507824, AV742057, AV763255, |
| | | | | | W60061, AV761786, AA644551, AI254615, |
| | | | | | AV735370, AW872676, AA649642, AA652057, AA984708, |
| | | | | | AA579736, AA682912, AA525824, |
| | | | | | AW238583, AW977303, AA470969, AI963720, AV734666, |
| | | | | | AV760624, AV762826, AA970213, |
| | | | | | AA908422, AI613280, BG150790, AV760777, AA834755, |
| | | | | | AW513362, BF668217, AA657535, |
| | | | | | AV761925, AA357937, AV730301, AV763971, AA491831, |
| | | | | | AI688846, AW731867, BE502107, |
| | | | | | AW517737, AV762558, AW238542, AA766151, AA862173, |
| | | | | | AA350859, AI619997, AA501418, |
| | | | | | AV702857, AA601355, AI634384, AF001552.1, AL354749.6, |
| | | | | | AL122015.17, AL163032.3, |
| | | | | | AF279660.2, AL034405.16, AL035699.4, AL365315.8, AC010269.5, |
| | | | | | AL022163.1, AL031661.28, |
| | | | | | AC090497.2, AC005084.1, D83989.1, X55926.1, X54181.1, |
| | | | | | U57007.1, X54178.1, U18391.1, |
| | | | | | U18392.1, U57006.1, U18394.1, X55925.1, U57005.1, |
| | | | | | X54179.1, X75335.1, X55932.1, |
| | | | | | AC020728.4, U18390.1, AC004887.2, M37551.1, X54175.1, |
| | | | | | U57009.1, U18395.1, AC006511.5, |
| | | | | | U18393.1, X54176.1, U57008.1, AC005521.1, AL135903.12, |
| | | | | | AC004662.1, AL158052.10, |
| | | | | | AC004525.1, X55923.1, AL136090.12, AL157955.5, Z22650.1, |
| | | | | | X54177.1, AL133332.12, |
| | | | | | AP001677.1, U18400.1, AC009481.4, U18396.1, AL121891.22, |
| | | | | | U18399.1, U57004.1, |
| | | | | | AP001696.1, AC002529.1, AC009950.6, AC005740.1, AL049745.9, |
| | | | | | AC006287.1, AC009498.3, |
| | | | | | AC034305.6, AC008168.3, AC004972.2, AC011938.4, AL031275.1, |
| | | | | | AC008962.8, AL139350.17, |
| | | | | | AL590621.10, AL050325.20, AC005913.2, AC010748.5, AL109755.14, |
| | | | | | AL157830.10, |
| | | | | | AC002303.1, AC009508.3, L47228.1, Z77249.1, AP000501.1, |
| | | | | | AC073138.3, AC006376.2, |
| | | | | | AC010482.7, AL049563.4, X55927.1, U18398.1, AC005274.1, |
| | | | | | U18387.1, AL139082.18, |
| | | | | | AL049539.21, AL138721.16, AL359393.9, X55930.1, AC008766.4, |
| | | | | | AL023281.1, AC009802.13, |
| | | | | | AC027345.4, AC002115.1, AC007272.3, AC008109.6, AC017078.8, |
| | | | | | AP002392.3, AL355578.4, |
| | | | | | AC018637.3, AL049713.20, AC004622.1, AP001700.1, AC009779.18, |
| | | | | | AC005158.3, |
| | | | | | AL162587.20, AF117829.1, AL163278.2, AC087312.8, X74558.1, |
| | | | | | AC007934.7, AL499604.9, |
| | | | | | U67831.1, AL354869.11, AL161935.10, AL589988.6, AC022335.8, |
| | | | | | AC022407.6, AC073910.20, |
| | | | | | AL356796.16, AL133415.12, AC008134.3, AL354751.7, AC016080.5, |
| | | | | | AL391478.14, |
| | | | | | AC011310.3, AC005544.1, AC005297.1, AC013264.4, AC003010.1, |
| | | | | | AC004491.1, AC002128.1, |
| | | | | | AC009311.3, AP001727.1, AL163248.2, AC087600.21, AL359012.7, |
| | | | | | AL022162.1, AL354716.9, |
| | | | | | AC022740.4, AC090886.1, AJ011930.1, AC090004.1, AL050333.18, |
| | | | | | AL590762.1, AC012410.9, |
| | | | | | AC009623.6, AC002091.1, AJ006995.1, AC006128.1, AP002532.1, |
| | | | | | AP003467.2, AC007970.3, |
| | | | | | AP000555.1, AL138759.20, AC012315.5, AC007179.3, AF149773.1, |
| | | | | | AL049613.2, AC008071.2, |
| | | | | | AL359380.16, AL354668.13, AC007132.3, AC084882.2, AC090710.16, |
| | | | | | AP002812.3, |
| | | | | | AC013242.7, AP002906.2, Z72001.1, AC004806.1, AL133344.28, |
| | | | | | AF195953.1, AC004865.1, |
| | | | | | Z92844.1, AP001533.4, AC004047.1, AC006375.4, AL137077.31, |
| | | | | | AL445663.10, AL133472.12, |
| | | | | | AF188030.3, AP002007.4, AL031390.4, AC008268.3, AP001683.1, |
| | | | | | AC008482.5, AC003983.1, |
| | | | | | AC017004.4, AL449265.13, U67829.1, AL109823.23, AD000090.1, |
| | | | | | AP000472.2, AP002026.1, |
| | | | | | AC016716.6, AL135786.17, AL353691.12, AC005399.19, AL020994.1, |
| | | | | | AL353800.10, |
| | | | | | AL158210.12, AP003438.2, AC016763.8, AC020698.4, AL357515.26, |
| | | | | | AF246928.1, Z94044.1, |
| | | | | | AF227510.1, AC008543.7, AC018809.4, AF077058.1, AP000567.2, |
| | | | | | AL357141.8. |
| HGBHI35 | 102 | 570262 | 1-1423 | 15-1437 | AW027617, AW167655, AV705616, BF112047, AV647323, |
| | | | | | AI761852, AV647362, BF475491, |
| | | | | | BF941241, AU134617, AW273477, AA632135, BF589834, |
| | | | | | AW188958, BE328783, BF673582, |
| | | | | | AW025350, AW469123, AI248475, AW071025, AW513405, |
| | | | | | AV707439, AA443956, AW959532, |
| | | | | | AA974499, AA586906, AA411210, AA748561, AV647324, |
| | | | | | AA574049, BF001545, AA993212, |
| | | | | | AU155540, AA405832, AA418055, T65000, AA633212, |
| | | | | | AA417996, AA716696, AW338423, AI951713, |
| | | | | | AW269824, AA705781, AW294610, N29931, AW193961, |
| | | | | | W74344, AI623473, W95062, N58311, |
| | | | | | AA434443, AI452555, AI476814, AI707848, AI591113, |
| | | | | | AW071570, AA504192, AI284330, AA993753, |
| | | | | | AA422102, AA814543, AA833607, R59175, H69589, |
| | | | | | N27730, N27744, AI050821, H91466, AV661353, |
| | | | | | N26927, AA384582, T53881, AA723025, AW952885, |
| | | | | | AA708478, AA412129, N80150, AA805411, |
| | | | | | AA325056, H86073, AW080735, AA719996, H48787, |
| | | | | | AW439101, AA327279, AW439110, R72184, |
| | | | | | AA317298, AA290758, AI302593, AI041429, AA932990, |
| | | | | | AV692965, H68481, AA290757, AI301278, |
| | | | | | AA928847, AV709914, R70407, AA342345, AW971285, |
| | | | | | T71152, AA528307, R00838, AI915200, |
| | | | | | AI470398, AA888272, T50944, T54028, AI784177, |
| | | | | | R69430, AI298655, AI801093, AA363967, |
| | | | | | AA935078, AA935062, T99499, AW450038, F37718, |
| | | | | | AI470409, AA419235, AW074842, AA700546, |
| | | | | | BF057503, AV656088, AI798643, AA946561, AV684912, |
| | | | | | C05231, AA342344, AA405831, AI682312, |
| | | | | | R72230, AV696820, AI557037, T72850, BG122003, |
| | | | | | AI478342, AA504193, AI474859, W91943, |
| | | | | | BG164862, AW841423, AI243763, AI364219, AA879063, |
| | | | | | AA419337, AV698254, BF847168, |
| | | | | | BG004190, AK001810.1. |
| HGLAF75 | 103 | 566838 | 1-762 | 15-776 | AW968403, AW268460, AV699333, BE388094, BE387809, |
| | | | | | AA805707, BF112044, AA769677, |
| | | | | | AI379717, AI419895, AI858342, AI708860, AA044030, |
| | | | | | AA465222, AI677780, AI189447, AI221144, |
| | | | | | AI073526, AI286149, AI540808, AI298414, AA847808, |
| | | | | | N29749, AW170779, AA344901, AA044352, |
| | | | | | R52970, BE836466, BE716265, BG057223, BE836496, |
| | | | | | H40701, R55340, AA873679, AI363753, |
| | | | | | BF792412, R40137, AW965142, AA725486, AA344902, |
| | | | | | T27542, BE716174, N57171. |
| HHBGS39 | 104 | 1003028 | 1-2881 | 15-2895 | AU118319, AU118145, AA001321, AI268416, AU144910, |
| | | | | | AA004368, AW291988, AU144790, |
| | | | | | AA677418, AI056605, BE708494, AA001908, AA707413, |
| | | | | | AA903931, AA004369, AA122399, |
| | | | | | BG000061, AA152481, AA878867, AV695708, AA152372, |
| | | | | | AI279749, R28072, AI446406, AI565299, |
| | | | | | T82947, R28288, AA346924, T97751, T97858, |
| | | | | | AI242583, AW839578, AK024922.1, AK021612.1. |
| HHEAA08 | 105 | 638231 | 1-2136 | 15-2150 | AL520596, AI370425, BE567612, AI343143, AI016704, |
| | | | | | BF678494, AI284640, AI952900, AL038606, |
| | | | | | AW302048, AI049996, AW500125, AA318267, BE139267, |
| | | | | | AW979140, AA484143, AV763401, |
| | | | | | AW021774, AI345123, AW302315, AI754661, BF725347, |
| | | | | | AV762129, AL039187, AL079734, |
| | | | | | AI344810, AV763657, BE676900, BE139358, AL045077, |
| | | | | | AA192278, AW069227, AV710066, |
| | | | | | AV758989, AL526288, AA528480, AW303196, AW088125, |
| | | | | | AI270117, AA491814, AW301350, |
| | | | | | AA448838, AI538812, AL041706, AI918013, AV682003, |
| | | | | | AI754291, AU154948, AV760937, |
| | | | | | AW419262, AV728928, AW833862, AW731867, AW238016, |
| | | | | | BG031290, AI696793, AA524832, |
| | | | | | AA601680, BF926429, BF916934, AI473701, F32710, |
| | | | | | N91310, AA730635, AI634187, AW193265, |
| | | | | | AW504224, BG033217, AA167055, N22032, AV755512, |
| | | | | | AL046409, AC016601.6, AL121988.10, |
| | | | | | AC010219.4, AF235097.1, AL035450.1, AL132986.4, AL133260.12, |
| | | | | | AC004000.1, AC005291.1, |
| | | | | | AL031431.8, AC009087.4, AF130343.1, AL138880.14, AC007036.3, |
| | | | | | AL132987.4, AL031719.12, |
| | | | | | M69197.1, AE006467.1, Z85996.1, AC012076.4, AL035400.13, |
| | | | | | AC007564.9, AC006206.3, |
| | | | | | AL449212.1, AL158830.17, AL356378.17, AL049569.13, AL031584.1, |
| | | | | | L78810.1, AL121845.20, |
| | | | | | AC007566.2, AC011465.4, AC005540.4, AC025572.13, AP001713.1, |
| | | | | | AC002352.1, AC007193.1, |
| | | | | | AL139092.12, AF001549.1, AL121865.7, AC010458.5, AL121895.26, |
| | | | | | AL133415.12, |
| | | | | | AL121657.2, AL389921.12, AP000100.1, AL031727.42, AL161747.5, |
| | | | | | AC008395.6, |
| | | | | | AL353140.12, AC073593.13, AL157828.14, AL157398.6, AC079141.7, |
| | | | | | AC006952.6, |
| | | | | | AL034431.16, AC078962.30, AC008882.6, AC009228.4, AP001694.1, |
| | | | | | AL121899.37, |
| | | | | | AC005697.1, AL160273.9, AL031291.3, AC008745.6, AL137859.3, |
| | | | | | AL161896.16, AC007055.3, |
| | | | | | AL121910.26, AL117328.5, AL450169.1, AC005768.17, AP000208.1, |
| | | | | | AP000130.1, AC005071.2, |
| | | | | | D83989.1, AP002008.5, AP000247.1, AL353613.10, U95740.1, |
| | | | | | AC002045.1, AC006057.5, |
| | | | | | AC009314.4, AC008747.5, AF279660.2, AC004231.1, AC078961.23, |
| | | | | | AP001725.1, AL035089.21, |
| | | | | | AP003357.2, AJ003147.1, AL359739.8, AL352984.4, M55538.2, |
| | | | | | AC005304.1, AC079045.2, |
| | | | | | AC004522.1, AF241728.1, AC007221.2, AL161937.13, Z82097.1, |
| | | | | | AF069291.1, AL110114.1, |
| | | | | | AC008482.5, AL109615.41, AL391122.9, AC018618.5, AL161421.11, |
| | | | | | AL049869.6, AC010489.4, |
| | | | | | AC005007.1, AC083870.2, AC006285.11, AL158035.14, AC007198.6, |
| | | | | | AC078876.15, |
| | | | | | AF243527.1, AL391280.15, AL031681.16, AC016025.12, AL160410.24, |
| | | | | | AL138762.20, |
| | | | | | U93305.1, AL031985.10, AL121754.18, AC008394.3, AC007161.1, |
| | | | | | AL590732.7, AC022212.4, |
| | | | | | AP002851.2, AL356321.9, AL008708.4, AL359846.11, AC006270.1, |
| | | | | | AL050349.27, |
| | | | | | AL445483.13, AC005325.1, AL353748.13, AC009955.4, AC002381.1, |
| | | | | | AL122004.17, |
| | | | | | AC009230.3, AL049776.3, AP001710.1, AC008547.5, AC008555.5, |
| | | | | | AC005520.2, AC002565.1, |
| | | | | | AL031176.8, AL138741.13, AC005678.1, AC004590.1, AL133551.13, |
| | | | | | AC009238.4, |
| | | | | | AC007673.7, AC008872.5, AJ289880.1, AL096793.20, Z85987.13, |
| | | | | | U57009.1, AC004890.2, |
| | | | | | AC005822.1, AL590762.1, AL160237.4, AL391684.6, U91326.1, |
| | | | | | AC083875.1, U96629.1, |
| | | | | | AP000426.3, AC013429.12, Z98051.6, AL031055.1, AL049758.11, |
| | | | | | AC004826.3, AL355096.4, |
| | | | | | AC009309.4, AP001830.4, AC008755.6, AC007749.3, AC005887.3, |
| | | | | | AC002395.1, AC002418.1, |
| | | | | | AC010504.7, AL161627.13, AL118511.25, AL139317.5, AL442203.12, |
| | | | | | AC004386.1, |
| | | | | | AP001972.4, AC016830.5, AC004832.3, AP001614.1, AC004846.2, |
| | | | | | AL035685.21, AC005701.1, |
| | | | | | AL132713.11, AC007465.4, AC005669.1, AL352976.3, AF134726.1, |
| | | | | | AC006052.5, AL133328.13, |
| | | | | | AC079684.16, AC011739.7, AC016027.15, AL359851.19, AC078958.30, |
| | | | | | AC022173.7, |
| | | | | | AC011359.5, AC006026.2, U57007.1, AL139100.9, AL445675.9, |
| | | | | | AL445258.4, AC009470.4, |
| | | | | | AL133324.13, Z82194.1, U18391.1, AC002316.1, U18394.1, |
| | | | | | AL356801.5, X54176.1, |
| | | | | | AP001781.4, AL135907.21, AL353734.12, AL031963.40, AL133338.8, |
| | | | | | AL135744.4, |
| | | | | | AL121601.13, AL359813.23, AP000036.1, AC009464.7, AC004812.1, |
| | | | | | AC018710.4, AL160192.3, |
| | | | | | AC026463.4, AL109825.23, AL121902.13, AC019041.8, AC079602.15. |
| HHENV10 | 106 | 562772 | 1-1141 | 15-1155 | AC004912.1. |
| HHFFJ48 | 107 | 634521 | 1-2552 | 15-2566 | BF872051, BF760479, AA486028, AI536141, N91095, |
| | | | | | AW301931, BF772459, AW852705, AW852684, |
| | | | | | AW852657, BE138714, AB058744.1, AL589723.7, AC006512.12, |
| | | | | | AL451107.6, U47924.1, |
| | | | | | AL590762.1. |
| HHFHJ59 | 108 | 411332 | 1-647 | 15-661 | AA833770, AW877426, AA804902. |
| HHGBO91 | 109 | 520198 | 1-701 | 15-715 | AA363260, AW063936, AI343123, AI648433, BE386324, |
| | | | | | BE409452, BF793428, AV738722, |
| | | | | | AV740060, AI284640, BE139358, AI612152, AL046409, |
| | | | | | AI254798, AV756074, AV712125, AV756848, |
| | | | | | AI061313, AW965518, AI284881, AI284888, AV757334, |
| | | | | | AI890348, AV760395, AI612032, AW303196, |
| | | | | | AI963720, AW301350, AV725431, AI306232, AW021774, |
| | | | | | AW021917, BE252421, AU152795, |
| | | | | | AV710482, AW274191, BE744242, AW274349, AW962942, |
| | | | | | BG249643, AI251576, AI583466, |
| | | | | | BF678427, BF980463, BF243118, AW504022, AW501806, |
| | | | | | AL048255, AV682003, AI254540, |
| | | | | | AI224184, AA747889, AW504104, AI349748, AI275328, |
| | | | | | AI251250, AW504480, AF074677, AI311505, |
| | | | | | AI064864, AA744001, AI610603, AI801205, AA572992, |
| | | | | | BF337291, H98660, BF673630, AW238583, |
| | | | | | AI053786, AA496901, BF917533, AL138455, AI590522, |
| | | | | | BF325535, AW499745, AW961593, |
| | | | | | AP002347.3, AC011475.6, AC004150.8, AC005231.2, AC005368.1, |
| | | | | | AL139100.9, AL096840.25, |
| | | | | | AF196969.1, AC007314.3, AC008760.6, AL132780.5, AL034372.33, |
| | | | | | AC016587.7, AL133163.2, |
| | | | | | AL133517.11, Z83826.12, AC005280.3, AL163032.3, AC019205.4, |
| | | | | | AP001716.1, AF111168.2, |
| | | | | | AC090939.1, AL096701.14, AC004965.2, AC005520.2, AP001726.1, |
| | | | | | AC004983.2, AJ400877.1, |
| | | | | | AL022476.2, AC006480.3, AC011464.5, AL096791.12, AL022326.1, |
| | | | | | AC006285.11, |
| | | | | | AC004638.1, AC007664.12, AC005701.1, AC008403.6, AL139809.16, |
| | | | | | AL139316.5, |
| | | | | | AC021999.4, AC005052.2, AC073657.5, AL121655.1, AC018711.4, |
| | | | | | AC007256.5, AL445483.13, |
| | | | | | AL137792.11, AL035683.9, AC004815.2, AL138849.12, AC011446.6, |
| | | | | | AL035587.5, AC003982.1, |
| | | | | | AL049761.11, AC004166.12, U95090.1, AC010530.7, AC000052.16, |
| | | | | | AC010319.7, AL139376.17, |
| | | | | | AC020754.4, AL356214.20, AC084865.2, AF254822.1, AC016772.8, |
| | | | | | AC083866.2, AC008946.6, |
| | | | | | AC004755.2, AC007386.3, U91321.1, AL049776.3, AC005089.2, |
| | | | | | AC011742.3, AC018808.4, |
| | | | | | AL033529.25, AC009086.5, AC002425.1, AC005736.1, AC005291.1, |
| | | | | | AC020928.6, AP001727.1, |
| | | | | | AC044797.5, AL360169.17, AC006530.4, AL355385.15, AC003070.1, |
| | | | | | AL031727.42, |
| | | | | | AL109797.18, AC007374.6, AC005295.1, AC006345.4, AL035458.35, |
| | | | | | AC006483.3, |
| | | | | | AC007114.7, AL450226.1, AC040160.4, AC008806.4, AC009501.3, |
| | | | | | AC007172.6, AC004148.1, |
| | | | | | AC008521.5, AL022336.1, AC008440.8, AC006001.2, AL135978.4, |
| | | | | | AL109743.4, AC008622.5, |
| | | | | | AC004033.3, AC024561.4, AC004475.1, AL139415.10, AP001728.1, |
| | | | | | AC020915.6, AC011465.4, |
| | | | | | AL139113.21, AC022007.3, AL080242.11, AL121652.2, AL049539.21, |
| | | | | | AC009060.7, |
| | | | | | AC008738.6, AL050335.32, AC027319.5, AL355392.7, AC007766.1, |
| | | | | | AC011484.4, AC021016.4, |
| | | | | | AL049569.13, AC012476.8, AC010311.8, AL035405.10, AL031005.1, |
| | | | | | AC004019.20, |
| | | | | | AC002565.1, AL031597.7, AC005971.5, AC079602.15, AC006064.9, |
| | | | | | AC005288.1, AC005015.2, |
| | | | | | AC002470.17, AL451125.7, AL008721.1, AC005077.5, AC006330.5, |
| | | | | | AC010326.6, AC034193.4, |
| | | | | | AC006329.5, AC008482.5, AC073138.3, AL162426.20, AC015982.9, |
| | | | | | AL353748.13, |
| | | | | | AC002310.1, AC016831.1, AC005844.7, AC007878.2, AL050349.27, |
| | | | | | AC006441.13, |
| | | | | | AC021188.6, AC004417.1, AC008280.4, AL137852.15, AC022392.4, |
| | | | | | AC007421.12, |
| | | | | | AP002812.3, AC069223.15, AC007686.5, AP001331.1, AC018758.2, |
| | | | | | AF107885.2, AC004971.3, |
| | | | | | AL132640.4, AC018828.3, AC074013.5, AL049780.4, AC007308.13, |
| | | | | | AP003357.2, AC010677.4, |
| | | | | | AC002316.1, AL031230.1, AL109628.5, AL008627.1, AC009570.13, |
| | | | | | AL512378.7, AC007255.4, |
| | | | | | AC006211.1, AC008892.5, AL136228.8, AC007404.4, AC011442.5, |
| | | | | | AC011811.42, |
| | | | | | AL121891.22, AL136179.15, AL136126.34, AL121601.13, AC006251.3, |
| | | | | | AL365338.17, |
| | | | | | AC002553.1, AC012306.11, AL133453.3, AL138787.11, Z98742.5, |
| | | | | | AC007216.2, AL033527.26, |
| | | | | | AC004596.1, U80017.1, AC005081.3, AC005098.2, AP000696.1, |
| | | | | | AL512347.14, AC002039.1, |
| | | | | | AC011895.4, AL139785.5, Z85987.13, AC005088.2, AL136172.16, |
| | | | | | AF001549.1, AC011449.6, |
| | | | | | AC002314.1, AC003029.2, AL024498.12, AF196779.1, AL034380.26, |
| | | | | | AP000557.2, AC007739.2, |
| | | | | | AC008891.7, AC022383.3, AC006038.2, AL121992.24, AP003439.2, |
| | | | | | AC004955.2, AC011455.6, |
| | | | | | AF243527.1, AL031447.4, AC018663.3, AC025594.5, AC007383.4, |
| | | | | | AL157938.22, Z98949.1, |
| | | | | | AC006084.1, Z93015.9, AP001725.1, AL109897.30. |
| HHGCM76 | 111 | 662329 | 1-697 | 15-711 | AW248957, BF828801, BF828604, AI675194, AW028119, |
| | | | | | BF826770, BF827069, AW452880, |
| | | | | | AI491913, AI799880, AW450970, AI377883, AI201976, |
| | | | | | AA595164, AI088096, AW612440, BE792795, |
| | | | | | AW006952, BF063362, AI697133, AA643065, AA580017, |
| | | | | | AI819005, AI866931, AI560641, AA635584, |
| | | | | | BF446220, AI829011, AW952316, AL524066, AW243832, |
| | | | | | AI200458, AI634449, AI670745, AI269568, |
| | | | | | AA326815, AI873666, AL523219, AL520944, AI478177, |
| | | | | | L31980, AW245254, AW194690, AW771866, |
| | | | | | AI767850, AW079488, T87766, D45523, BE242113, |
| | | | | | AA055697, AI306732, AW275312, BE280419, |
| | | | | | AI908657, R48473, AA013188, AI908646, BG250796, |
| | | | | | BE796614, T72628, BC002980.1, AC003665.1. |
| HHGCQ54 | 112 | 544615 | 1-861 | 15-875 | AL528163, BG252074, BF529806, BF855582, AA234290, |
| | | | | | AW264333, AI122942, AW293770, |
| | | | | | AA458524, R41805, AW338445, AW264239, AI091253, |
| | | | | | AW316552, AA454605, AI459366, BE299516, |
| | | | | | BF856403, R42539, AI698643, AI082503, BF436761, |
| | | | | | AI673224, AI864282, BG222925, F11117, |
| | | | | | AW293131, AI446586, AW029153, AA568555, AI123718, |
| | | | | | AI352145, AA234190, BG251585, |
| | | | | | AI459970, R41441. |
| HHPEN62 | 113 | 695134 | 1-2138 | 15-2152 | AI939620, AI480056, AW300615, AW300620, AI589129, |
| | | | | | BE386438, BF920454, BE386547, |
| | | | | | AW961851, AI911546, AV726263, AI361251, AI498527, |
| | | | | | AV725146, AW901919, BE967591, H41544, |
| | | | | | AA326679, AA348503, AI422476, AA912288, AI423129, |
| | | | | | BC004271.1. |
| HJABB94 | 114 | 456466 | 1-1541 | 15-1555 | BE905356, AI026821, AA503776, BF114724, AI435527, |
| | | | | | AL036946, AW298357, BF240642, AA969442, |
| | | | | | AI767392, AI142574, AI094514, AW073866, AW241144, |
| | | | | | AA206595, AA040034, AA354909, |
| | | | | | AW972134, AA814156, AA933895, AA040828, C01416, |
| | | | | | AA457220, AL138875.8, AY027525.1. |
| HJACG02 | 115 | 1307789 | 1-561 | 15-575 | AA311223, BF002026, N41594, N30820, BF982046, |
| | | | | | AI829327, BE047833, AI457369, AW071417, |
| | | | | | BF968205, AI340627, R36271, AL036980, BF061283, |
| | | | | | BG168549, AW022682, BG034550, AV682418, |
| | | | | | AL047042, BF343172, BG113299, AW020693, BF751308, |
| | | | | | AI452560, AI690748, AI349645, AW946806, |
| | | | | | AI340511, BF924882, AW074869, AW196299, AL038445, |
| | | | | | BE781369, AW302992, BG110684, |
| | | | | | BE887488, AL514193, AI310575, BG164558, AI340533, |
| | | | | | AI349957, AI433384, BF680133, AV715560, |
| | | | | | AI309401, AI345005, BG163618, AI343112, AV743962, |
| | | | | | AI826225, AI811785, AI494201, AW054931, |
| | | | | | AW268302, AW301300, AI349598, BF672397, AW072719, |
| | | | | | AW075207, BF526020, AV741327, |
| | | | | | AI345735, BG036846, AI697243, BE536058, AW193134, |
| | | | | | AI889147, BF904189, BE910373, AI500077, |
| | | | | | AA225339, BE138712, AI307210, BG033723, AI589267, |
| | | | | | AI269862, BE885353, AI313320, BG058150, |
| | | | | | BE886728, AW827106, BF527014, AI313352, BG110517, |
| | | | | | AL039086, AW079336, AI251434, AI1274728, |
| | | | | | BF868928, AI524780, AI589947, AV682724, AI439717, |
| | | | | | AI312146, AI312339, AI814087, AI345745, |
| | | | | | AL036925, AI345258, AI932638, AI470651, AL036857, |
| | | | | | AW050578, AW196105, AV682227, AI306705, |
| | | | | | AW269097, AI620639, AI611348, AW090393, AL042628, |
| | | | | | AW152469, AA833760, BG256090, |
| | | | | | AI866798, AW074993, AI567351, AI431424, AI349614, |
| | | | | | AI311604, AW105601, BE966990, AL044207, |
| | | | | | AW167918, AI611738, AW169604, AW268253, AI862144, |
| | | | | | AI567612, BE886827, BF793308, AI890806, |
| | | | | | AI349256, AL036664, AI554821, AI312152, AI955906, |
| | | | | | AI336495, BF970768, BF885000, AW075084, |
| | | | | | AL120854, BE895585, AI950664, BE897632, BE964078, |
| | | | | | BF872670, AW022699, AI349937, AL036923, |
| | | | | | AW089572, AI334884, AI307543, AW151138, AW071412, |
| | | | | | BF885081, AI307708, AI312325, AI500659, |
| | | | | | AI868204, AI340659, BF816037, AI280655, AI612885, |
| | | | | | BF092710, AW302965, BF339322, AI334930, |
| | | | | | AI309443, AV699211, AV734185, AI307520, AI445237, |
| | | | | | AV724373, AI590423, AV756798, AI345739, |
| | | | | | AI889168, AI440263, AW117743, AI312143, AW673635, |
| | | | | | AW806761, AI343037, AV708834, AI434256, |
| | | | | | AI312428, W33163, BG109270, BE966829, AI349955, |
| | | | | | AW075093, AI371228, BE548914, AW827206, |
| | | | | | AI348897, AA427700, AI306613, AI312357, AI335426, |
| | | | | | AI348777, AI308032, AI569583, AI687127, |
| | | | | | BG249582, AI783997, BG030364, BG104820, AW161579, |
| | | | | | AI627988, AI344785, BG113662, BE971716, |
| | | | | | BF970449, AL079963, AL036718, BE047852, BE785868, |
| | | | | | AI207454, AI382670, AW020095, AI874166, |
| | | | | | AL036901, BE047952, AI670009, BG180996, BF970990, |
| | | | | | BF526262, BG027280, AL036274, BF061286, |
| | | | | | AI497733, AL041150, AI288285, AI890507, BG026428, |
| | | | | | AW827115, AW268964, AI343091, AI318280, |
| | | | | | AI567582, BG165051, AI554245, BE963035, BE138658, |
| | | | | | BG260037, AI310582, BG032208, BF344691, |
| | | | | | BE885490, AF352730.1, AF205952.1, AF323081.1, AK024538.1, |
| | | | | | X53587.1, AL512765.1, |
| | | | | | AL050393.1, AK025254.1, AF090901.1, AK026542.1, AL136787.1, |
| | | | | | AK026597.1, BC006525.1, |
| | | | | | AF218031.1, BC001963.1, BC007326.1, AB055366.1, AK027213.1, |
| | | | | | AL389939.1, AK026528.1, |
| | | | | | AK026855.1, AL122110.1, BC008780.1, AF090943.1, AL133098.1, |
| | | | | | AL136799.1, BC008070.1, |
| | | | | | BC003687.1, AK024524.1, AF091084.1, AL049466.1, AK025967.1, |
| | | | | | AK026480.1, BC002839.1, |
| | | | | | BC006807.1, AL136789.1, AL157482.1, AL117394.1, AK025391.1, |
| | | | | | AL137560.1, AY034001.1, |
| | | | | | AK025349.1, AF125948.1, AL359615.1, AJ242859.1, AK025906.1, |
| | | | | | AL136915.1, AL110221.1, |
| | | | | | AL050092.1, AL512718.1, AB056427.1, AK027146.1, AB060825.1, |
| | | | | | AL133075.1, AK025484.1, |
| | | | | | AK000391.1, AF056191.1, AB051158.1, AK026583.1, AB060908.1, |
| | | | | | AL133557.1, AL117457.1, |
| | | | | | AL110225.1, AK026526.1, AL080159.1, AL137550.1, AK026629.1, |
| | | | | | AL133640.1, AB063046.1, |
| | | | | | AF217987.1, AK026452.1, U42766.1, AL133606.1, AK026534.1, |
| | | | | | AL133067.1, AK024588.1, |
| | | | | | AB047615.1, AB048954.1, AK027182.1, AL049464.1, AL133113.1, |
| | | | | | AL133560.1, AL137521.1, |
| | | | | | BC008983.1, AB060912.1, AF097996.1, AK026353.1, BC008899.1, |
| | | | | | BC001967.1, AK026959.1, |
| | | | | | AL137459.1, AB060839.1, BC003548.1, AF090900.1, AL050116.1, |
| | | | | | AB052200.1, AL133016.1, |
| | | | | | AL359620.1, AB060214.1, AF057300.1, AF057299.1, X72889.1, |
| | | | | | AK000618.1, BC002643.1, |
| | | | | | BC008417.1, AK026164.1, AK026506.1, AK026741.1, AL359618.1, |
| | | | | | AL442082.1, BC007199.1, |
| | | | | | AK025465.1, U91329.1, L19437.2, AL049314.1, AB056421.1, |
| | | | | | BC004958.1, AK027164.1, |
| | | | | | AB056809.1, AL162062.1, AL050149.1, AL389982.1, AL137463.1, |
| | | | | | AL122123.1, AF230496.1, |
| | | | | | AL162002.1, AB048964.1, AL133080.1, AL390154.1, BC006164.1, |
| | | | | | AK000137.1, AK026762.1, |
| | | | | | AL117460.1, AK026630.1, AL512689.1, AL512719.1, AL050108.1, |
| | | | | | AK026593.1, AB063100.1, |
| | | | | | S61953.1, AL049300.1, AL049452.1, BC005151.1, AK000647.1, |
| | | | | | BC001045.1, AB063079.1, |
| | | | | | BC002733.1, AL136893.1, BC002342.1, AK025383.1, BC004556.1, |
| | | | | | BC009284.1, AL080086.1, |
| | | | | | BC005678.1, AF078844.1, AF026816.2, AL136928.1, AL512750.1, |
| | | | | | BC003627.1, Y16645.1, |
| | | | | | AB062942.1, AF051325.1, AL512754.1, BC006103.1, U58996.2, |
| | | | | | AB060863.1, AL136844.1, |
| | | | | | AK000212.1, AL080074.1, AL359601.1, AF262032.1, AK026600.1, |
| | | | | | AL136864.1, U80742.1, |
| | | | | | AL136845.1, AL122093.1, BC008893.1, AL136892.1, BC006201.1, |
| | | | | | AL117435.1, BC008365.1, |
| | | | | | AL110280.1, AF061943.1, AL136749.1, AK027868.1, AB019565.1, |
| | | | | | AF162270.1, BC008382.1, |
| | | | | | AL133104.1, AF003737.1, AF353396.1, AL137557.1, AK000445.1, |
| | | | | | BC008284.1, AK000432.1, |
| | | | | | AF218014.1, AL136786.1, AB050510.1, AK024601.1, AL117583.1, |
| | | | | | AL137648.1, AB060929.1, |
| | | | | | AK025491.1, AL117585.1, AL122098.1, AK025573.1, AF219137.1, |
| | | | | | AF090903.1, AF125949.1, |
| | | | | | AF260566.1, AL050146.1, AF111847.1, AL442072.1, AB062978.1, |
| | | | | | AJ006417.1, AL122121.1, |
| | | | | | AJ012755.1, AL136784.1, AF104032.1, BC008488.1, AL080060.1, |
| | | | | | AB055315.1, AL137478.1, |
| | | | | | AB047887.1, AF132676.1, AF061836.1, AF183393.1, AK027204.1, |
| | | | | | AL080127.1, AK026647.1, |
| | | | | | AK027116.1, AL096744.1, AB055361.1, AL353940.1, BC008387.1, |
| | | | | | AL137556.1, X82434.1, |
| | | | | | AF090934.1, AL122049.1, AL162008.1, AB063070.1, AL122050.1, |
| | | | | | AL162003.1, AL137271.1, |
| | | | | | BC005168.1, AB048974.1, AK025798.1, AB055368.1, S78214.1, |
| | | | | | AK000486.1. |
| HJACG30 | 116 | 895505 | 1-1518 | 15-1532 | AA311188, BF940968, AI478697, AA309875, AA481249, |
| | | | | | AL533052, AA481563, AW242463, |
| | | | | | AA760629, AV651897, AV660258, AV661286, AV709580, |
| | | | | | AV653353, AV726590, AV703632, |
| | | | | | AV725255, AW960067, AV705453, AV726243, AV652001, |
| | | | | | AV704144, AV726194, AW956292, |
| | | | | | AW949777, AV708520, AV727618, AW959858, AV656283, |
| | | | | | AW967329, AV727932, AV728953, |
| | | | | | AV725582, AV708786, AV708872, AV661369, AW952013, |
| | | | | | AV705340, AV704234, AW965148, |
| | | | | | AV726156, AV705836, AV708991, AV725618, AW952301, |
| | | | | | AW958796, AV725596, AV709248, |
| | | | | | AW959986, AV726337, AV709407, AV728355, AV725031, |
| | | | | | AV707948, AV725441, AV729424, |
| | | | | | AV652528, AV725577, AV707556, AV704626, AV702071, |
| | | | | | AV706223, AV705665, AV704785, |
| | | | | | AV728404, AV709733, AV729366, AV708320, AV705343, |
| | | | | | AV727822, AV707264, AV704611, |
| | | | | | AV729473, AV702738, AV725321, AV690930, AV728743, |
| | | | | | AV727978, AV727337, AV727562, |
| | | | | | AV729129, AV704712, AV701953, AV727052, AW955629, |
| | | | | | AV729532, AV704520, AV706964, |
| | | | | | AV704973, AV702817, AV705504, AV709356, AV704279, |
| | | | | | AV705829, AV702164, AV701880, |
| | | | | | AV701626, AV707401, AV704756, AW955019, AV701183, |
| | | | | | AV728289, AV708203, AV703591, |
| | | | | | AV697880, AV647941, AV703417, AV753624, AW963446, |
| | | | | | AV654035, AV709935, AV726628, |
| | | | | | AV707654, AV706290, AV655552, AV654282, AW949521, |
| | | | | | AV709880, AV709939, AV705189, |
| | | | | | AV704686, AV706882, AV727314, AV702954, AV727238, |
| | | | | | AV691615, AW967328, AV682997, |
| | | | | | AV727126, AV727347, AV728652, AV702787, AV706162, |
| | | | | | AV709596, AV686417, AV701728, |
| | | | | | AV701873, AV656240, AV692972, AV694871, AV705239, |
| | | | | | AV727459, AV655901, AV728715, |
| | | | | | AV701499, AV703972, AV703090, AV707794, AV702790, |
| | | | | | AV728546, AV705267, AV703762, |
| | | | | | AV703273, AV706734, AV702854, AV709025, AV706025, |
| | | | | | AV705684, AV656224, AV705299, |
| | | | | | AV709273, AV706165, AV727343, AV709932, AV702625, |
| | | | | | AV727468, AV707088, AV709549, |
| | | | | | AV645545, AV702498, AV701874, AV706671, AV705433, |
| | | | | | AV705866, AV728255, AV709256, |
| | | | | | AV706076, AV726559, AV651075, AV702537, AV706279, |
| | | | | | AV703436, AV727103, AV704097, |
| | | | | | AV726653, AV706532, AV706133, AV701496, AV658784, |
| | | | | | AV727807, AV728459, AV729077, |
| | | | | | AV707804, AV704592, AV704974, AV701858, AV703456, |
| | | | | | AV703515, AV702280, AV727032, |
| | | | | | AV705416, AV704116, AV702728, AV706910, AV727047, |
| | | | | | AV706889, AV705014, AV705047, |
| | | | | | AV703035, AV701538, AV727029, AV702869, AV725380, |
| | | | | | AV728455, AV706741, AV707830, |
| | | | | | AV707510, AV704971, AV706683, AV725956, AV707769, |
| | | | | | AV705234, AV706891, AV706527, |
| | | | | | AV728471, AV706758, AV690921, AV707798, AV725991, |
| | | | | | AV702725, AV724987, AV706448, |
| | | | | | AV725845, AV685113, AV726789, AV725387, AV726830, |
| | | | | | AV726787, AV702417, AV701844, |
| | | | | | AV702851, AV727189, AV706655, AV725386, AV655067, |
| | | | | | AW962136, AV706992, AV707420, |
| | | | | | AV706183, AV703366, AB000616.1, U94592.1, AJ244005.1, |
| | | | | | AJ244004.1, AJ244003.1, |
| | | | | | AJ244007.1, D78345.1, D50010.1, D13316.1, AB025273.1, |
| | | | | | AF144029.1, AJ276256.1, |
| | | | | | AJ276254.1, Z30183.1, AF144028.1, X82834.1, Y14219.1, |
| | | | | | U45328.1, AB005666.1, S81957.1. |
| HJBCY35 | 117 | 719729 | 1-1545 | 15-1559 | AL518865, AL526445, AL518864, BF690211, BE795952, |
| | | | | | BG261247, BG122941, BE871131, |
| | | | | | BF342499, BF797882, BG034854, BE874386, BF684303, |
| | | | | | AW958340, BF055513, BE265238, BF055496, |
| | | | | | AL042954, AL044311, AW393087, BF590235, BE251517, |
| | | | | | BF688851, AW500006, BF750912, |
| | | | | | BF436031, BE207255, AI523943, AI809559, AW615714, |
| | | | | | AI088845, AI199469, AI088821, BE792741, |
| | | | | | AA707004, AI393362, AI859578, AA864359, AI359119, |
| | | | | | AI963339, AA259086, AW027379, AA186786, |
| | | | | | AA703021, AA305929, AA393356, BE729570, AI961726, |
| | | | | | AW274049, AI216448, AW503180, |
| | | | | | AW505339, AI015694, AA291342, AI049539, AW873566, |
| | | | | | AI092749, BE410341, AI817912, AI870620, |
| | | | | | H44330, AI366215, AA258242, R46300, R16949, |
| | | | | | AI744596, R54656, BE386449, BE410337, AI807057, |
| | | | | | AW081887, AL041401, H15972, BE710574, BE410414, |
| | | | | | BE535502, BE222788, AA398688, AW273864, |
| | | | | | AA404987, D59795, AA077661, BE047327, T10451, |
| | | | | | AI871075, D59810, AI368575, BF526818, |
| | | | | | AA962247, AA335735, AW000813, BF435172, AA188015, |
| | | | | | R75708, AA329264, BE713106, AI218840, |
| | | | | | AA329538, AA291343, AA826970, T35806, R10855, |
| | | | | | D59833, D59821, BE547124, D80231, AI080034, |
| | | | | | AA299767, BF203222, AI908002, AA973311, AW087244, |
| | | | | | BF920764, AI648592, D80329, BE537114, |
| | | | | | BF511965, D59677, W93021, AI919083, AA749327, |
| | | | | | R16895, R55419, AA354448, AA136776, R54853, |
| | | | | | R46205, D59561, AI969256, W51754, AW273865, |
| | | | | | R10856, AI452772, BF765954, R10335, BF858687, |
| | | | | | AA076725, BF955782, BF206768, BF310354, BF032473, |
| | | | | | C01203, BC004286.1, AL050110.1, |
| | | | | | AB037861.1, AL137358.1. |
| HJPAD75 | 118 | 651337 | 1-1217 | 15-1231 | AL530365, AL524811, BG035149, AL524846, AV653215, |
| | | | | | AL525028, BF031163, BE464161, |
| | | | | | BF064198, BG057645, BE677690, AV714679, AI954819, |
| | | | | | AA708718, AA773040, AW206827, |
| | | | | | BE677490, AW590005, AL522800, AI075390, BG179367, |
| | | | | | AI933314, AA022693, AA563665, AI582700, |
| | | | | | BF591973, AI933036, AA011394, BE463890, AI304827, |
| | | | | | AW467513, AI675049, N47573, BE537595, |
| | | | | | AI075392, AI346305, AL514603, W26975, H02832, |
| | | | | | AI290715, AA535130, AW137781, AW298065, |
| | | | | | BF927479, AA917670, AA011431, AL530366, AA974770, |
| | | | | | AA535120, AI497684, AI277012, AI274193, |
| | | | | | AL514604, AW297638, AW779938, AA356778, AW067366, |
| | | | | | AL524812, AL524847, BF763877, |
| | | | | | AV652546, H03723, F09604, F09318, H83110, |
| | | | | | AA216050, AW573003, BF926201, AI572540, |
| | | | | | AL525029, BF092250, D80466, AI940747, AK027129.1, |
| | | | | | BC008984.1, AF043945.2, AL163284.2. |
| HKABZ65 | 119 | 862030 | 1-1175 | 15-1189 | AA715814, AA503019, AV762033, BE155099, AV734997, |
| | | | | | BF917346, AW338860, AC011666.28, |
| | | | | | AF242518.1, AF109907.1, AC004867.5, AC020917.4, AC004166.12, |
| | | | | | AL356915.19, AC005071.2, |
| | | | | | AC004878.2, AC005052.2, AC005081.3, AC002549.1, AL590763.1, |
| | | | | | AC020663.1, AC006064.9, |
| | | | | | AC008745.6, AC004858.2, AC022405.5, AC007666.12, AC008750.7, |
| | | | | | AL451144.5, AP001716.1, |
| | | | | | AC009131.6, AC004656.1, AL109825.23, AL355312.24, AL035086.12, |
| | | | | | AC010605.4, |
| | | | | | AC004067.1, AC004477.1, AC008736.6, AL109915.10, AC006023.2, |
| | | | | | AL033529.25, |
| | | | | | AC007637.9, AL139317.5, AL031311.1, AL049776.3, AC004971.3, |
| | | | | | AC009220.10, AL080243.21, |
| | | | | | AC005015.2, AC004686.1, AL022318.2, AC002310.1, AC009123.6, |
| | | | | | Z93015.9, AC021999.4, |
| | | | | | AL355353.23, AL050318.13, AL161756.6, AC011464.5, AL132712.4, |
| | | | | | AL359513.12, |
| | | | | | AC007546.5, AP001695.1, AL035683.9, AC018711.4, D87675.1, |
| | | | | | AL133444.4, AL139100.9, |
| | | | | | AF030453.1, AC006077.1, AC008895.7, AP001713.1, Z84487.2, |
| | | | | | AL357153.4, AL163636.6, |
| | | | | | AL359382.23, AC004770.1, AP001972.4, AC004675.1, AL355392.7, |
| | | | | | AC020906.6, AL138784.30, |
| | | | | | AC020754.4, AL162426.20, AC002288.1, AC009068.10, AC008101.15, |
| | | | | | AC008623.4, |
| | | | | | AC008891.7, Z98884.11, AL136137.15, AC011247.10, AL133163.2, |
| | | | | | AP001727.1, AC005098.2, |
| | | | | | AC004659.1, AC005670.1, AL139022.4, AC009812.17, AF088219.1, |
| | | | | | AL035404.20, |
| | | | | | AL139801.17, AF228703.1, AC002492.1, AC006084.1, AL353594.13, |
| | | | | | AC005077.5, |
| | | | | | AL160271.19, AP001724.1, AC008537.5, AC024561.4, AL139353.3, |
| | | | | | AC004491.1, AC008626.5, |
| | | | | | AL391987.15, AC010530.7, AP003352.2, AC009267.15, AL122013.5, |
| | | | | | AP000008.1, AC087071.2, |
| | | | | | AC009314.4, AC020913.6, AL078463.11, AL096700.14, AC002369.1, |
| | | | | | AC010102.3, AP003357.2, |
| | | | | | AL031123.14, Z95331.2, AL513008.14, AL118501.22, AP001435.2, |
| | | | | | AC005200.1, AJ400877.1, |
| | | | | | AC011469.6, AC016772.8, AC005089.2, AC005088.2, AF312912.1, |
| | | | | | AL022316.2, AL080317.11, |
| | | | | | AP001693.1, AP000553.1, AL390294.19, AC006345.4, AC091394.2, |
| | | | | | AL359813.23, AC007283.3, |
| | | | | | AL353807.18, AL109921.21, AC074121.16, Z98742.5, AC007383.4, |
| | | | | | AF243527.1, AC027130.5, |
| | | | | | AC010504.7, AL035462.21, AC010650.8, AC005180.2, AF334404.1, |
| | | | | | AL139187.19, AC005037.2, |
| | | | | | AL021391.2. |
| HKAFT66 | 122 | 946512 | 1-987 | 15-1001 | AA436785, AI804932, AA310516, AW966935, AA873013, |
| | | | | | AA251417, AI798761, AA250867, |
| | | | | | BE720668, AW827206, BG122481, AI826225, AI811785, |
| | | | | | AI539808, BF970449, AL039086, AW983783, |
| | | | | | AI554821, AI784252, AW105601, AV708119, AW054931, |
| | | | | | AV727839, BF968205, AL119863, |
| | | | | | AI280747, AI611738, BE047737, BF970768, AW193134, |
| | | | | | AW118518, BF904265, BF089711, AI610362, |
| | | | | | AL042628, BF793370, AL036980, AI312428, AA833760, |
| | | | | | AL513763, AI829327, AI433384, AI589267, |
| | | | | | AI269862, AI564723, BG031539, AI624548, AW302992, |
| | | | | | BG260037, AI802542, AI569583, AW169653, |
| | | | | | AI800453, BE048071, BF792961, AI439717, AI567612, |
| | | | | | AI611348, AI869367, AW081797, BF343172, |
| | | | | | BG031815, AL038605, AI570781, AW051258, AL513901, |
| | | | | | AI802240, AI274728, AW071417, AI571909, |
| | | | | | BG249582, BG257535, AW152469, AI612885, AW022682, |
| | | | | | AW148320, AI569579, AI252023, |
| | | | | | AI608936, AW075413, AI500077, AI318280, BE781369, |
| | | | | | AI636585, AI251434, AI862144, BG255895, |
| | | | | | AI890806, AI625094, AI955906, AI309401, BG110517, |
| | | | | | AI431424, AI343112, AI612913, BG110684, |
| | | | | | BE895003, BG168549, AW268253, AW301300, AI349598, |
| | | | | | AI554344, AL036664, AW075207, |
| | | | | | BE886728, AI345735, AI678357, BE964078, BF872670, |
| | | | | | AI475394, AI633419, AI348897, BF904258, |
| | | | | | BE138712, AI500659, BE966699, AI247193, BE887488, |
| | | | | | BG030364, AI648684, AI313320, AI627988, |
| | | | | | AI251221, AI630928, AI340627, AA640779, AI340603, |
| | | | | | BF904263, BE910373, AV743962, AI587143, |
| | | | | | AI312146, AI312339, AA572758, AI889168, AI345258, |
| | | | | | AI348854, AW193000, BE964614, BF817926, |
| | | | | | BE965432, AW020693, AI457369, AL040243, AI445115, |
| | | | | | AI620866, AL513699, AW081242, AI610645, |
| | | | | | AI801325, AI866798, AI932794, AI689248, AI340582, |
| | | | | | BG110241, AA225339, AA427700, AI270707, |
| | | | | | BG179993, AV682672, AW827228, AI955467, AI681985, |
| | | | | | AI684265, BE895585, AW074993, AI349614, |
| | | | | | AI590415, AI811353, AI354283, BF868928, BE885241, |
| | | | | | AI564247, BG058398, AI302910, AI955917, |
| | | | | | AI349256, AW946806, AI312152, AI174394, AV682867, |
| | | | | | H89138, AW075084, AI567351, AI800433, |
| | | | | | AI950664, BE048179, AL036288, AI634224, AI349937, |
| | | | | | AW089572, AI334884, AL039132, AV651436, |
| | | | | | AI670009, AI349957, AI307708, AI312325, BF981774, |
| | | | | | AW269097, AI609409, BG036846, AI591420, |
| | | | | | AW190042, AI572892, AL045266, BF971016, AV682218, |
| | | | | | AL121286, AI916419, BF925729, BF339322, |
| | | | | | AI307520, AI925156, AI445237, BE047952, BG180996, |
| | | | | | AI306613, BE544111, BE885353, AI434256, |
| | | | | | AV708097, AV712838, BF924882, BF885000, BG113299, |
| | | | | | AV757028, AA012905, AI917123, |
| | | | | | AL134999, AW075351, AV682521, AI874166, AL036736, |
| | | | | | AL036901, BG168696, AW151138, |
| | | | | | AW268302, BG033723, AW023590, AI306705, AI436456, |
| | | | | | AI608667, AV682763, W33163, AI282281, |
| | | | | | BE785868, AW170635, BG250190, AW073994, AL390882.12, |
| | | | | | AK027164.1, AF056191.1, |
| | | | | | BC003687.1, AK000432.1, AL512733.1, AK024538.1, AL157482.1, |
| | | | | | AF177336.1, AL117460.1, |
| | | | | | X72889.1, AF090934.1, AL359601.1, AK026526.1, BC008488.1, |
| | | | | | AK024524.1, AK024588.1, |
| | | | | | BC001045.1, AL136787.1, AB047904.1, AL049452.1, AK025084.1, |
| | | | | | AK026947.1, AL512750.1, |
| | | | | | AF090896.1, AL136845.1, AL050146.1, AK026855.1, AK026597.1, |
| | | | | | AB048954.1, AB056420.1, |
| | | | | | AL137560.1, AL136749.1, AK027868.1, AK027096.1, AL359583.1, |
| | | | | | AL136844.1, AB060852.1, |
| | | | | | AL157431.1, AB060826.1, AB060916.1, AB060825.1, AB055368.1, |
| | | | | | BC008893.1, AL117435.1, |
| | | | | | AK027213.1, AK000614.1, AL162083.1, AL049464.1, AK026534.1, |
| | | | | | AJ242859.1, AL136892.1, |
| | | | | | AK000137.1, AK025524.1, AL137463.1, AF090943.1, AB048964.1, |
| | | | | | AK025906.1, BC008070.1, |
| | | | | | AB047801.1, AB055303.1, AB060887.1, AL359615.1, AK000618.1, |
| | | | | | AL137550.1, AF225424.1, |
| | | | | | AL359596.1, AL117583.1, AK026647.1, AL133080.1, AK026629.1, |
| | | | | | AL133075.1, AF125948.1, |
| | | | | | AF111847.1, AF146568.1, AL133113.1, BC007199.1, S61953.1, |
| | | | | | AK026045.1, AB060908.1, |
| | | | | | AL133557.1, AL136789.1, AB049758.1, AL122093.1, AL133606.1, |
| | | | | | BC008983.1, BC008382.1, |
| | | | | | AK026592.1, BC008417.1, AK026353.1, AB055366.1, AL050149.1, |
| | | | | | AL133016.1, AL442082.1, |
| | | | | | AL110225.1, BC008365.1, AL117394.1, AB051158.1, AL389982.1, |
| | | | | | AL117457.1, AK026504.1, |
| | | | | | AK025092.1, AL122098.1, AL050116.1, AK025772.1, AL080124.1, |
| | | | | | AL136799.1, BC003683.1, |
| | | | | | AK026542.1, AK000647.1, AB060863.1, AL110221.1, AL137527.1, |
| | | | | | AB063070.1, AF218014.1, |
| | | | | | AL049314.1, BC002733.1, AK000083.1, AL137538.1, BC008387.1, |
| | | | | | AL442072.1, BC006412.1, |
| | | | | | AL050393.1, AF078844.1, AF091084.1, AL136928.1, X82434.1, |
| | | | | | AF097996.1, AK025967.1, |
| | | | | | AK025391.1, AL080159.1, BC008899.1, BC001967.1, AL512754.1, |
| | | | | | AK026959.1, Z82022.1, |
| | | | | | AB063046.1, AL137459.1, AB063084.1, AB052200.1, U80742.1, |
| | | | | | AB056768.1, AB019565.1, |
| | | | | | AL122123.1, AF230496.1, AL137557.1, AK000445.1, AL136786.1, |
| | | | | | U42766.1, AL137648.1, |
| | | | | | AK025491.1, AL050277.1, AL117585.1, AL512689.1, AF219137.1, |
| | | | | | AF090903.1, AF125949.1, |
| | | | | | AK026593.1, AF260566.1, AL050108.1, AL133565.1, AL122121.1, |
| | | | | | AL049466.1, AB055361.1, |
| | | | | | BC006807.1, AB056421.1, AF090900.1, AK026452.1, AL583915.1, |
| | | | | | AL512719.1, AB047615.1, |
| | | | | | AL133640.1, AK026741.1, AK025484.1, AB055315.1, AL050024.1, |
| | | | | | BC002839.1, AL110196.1, |
| | | | | | AL122050.1, AJ012755.1, AL110197.1, S78214.1, AK026784.1, |
| | | | | | AL162006.1, BC007021.1, |
| | | | | | AL136768.1, AL512765.1, AL136586.1, AF090901.1, AL512718.1, |
| | | | | | AL080060.1, AB052191.1, |
| | | | | | AK026086.1, AB048953.1, AL512761.1, AK025339.1, AB063008.1, |
| | | | | | AK026651.1, AL359618.1, |
| | | | | | AF183393.1, AL512746.1, AF207829.1, AK026532.1, AL353940.1, |
| | | | | | AL133560.1, AK000718.1, |
| | | | | | AL390167.1, U91329.1, AK026865.1, AF106862.1, AF104032.1, |
| | | | | | AF061943.1, AK000652.1, |
| | | | | | AL122110.1, AL359941.1, AK027113.1, AB060912.1, Y16645.1, |
| | | | | | AL049938.1, AL133093.1, |
| | | | | | AL389978.1, AL512684.1, AK026583.1, AL049430.1, AB050510.1, |
| | | | | | AL049382.1, AL137271.1, |
| | | | | | BC004951.1, BC008280.1, AK026744.1, AK025958.1, AK025414.1, |
| | | | | | AK027204.1, BC008485.1, |
| | | | | | AB062938.1, AK026630.1, AL136843.1, AK025632.1, AL080127.1, |
| | | | | | AL162062.1, AK026927.1, |
| | | | | | AK000323.1, BC004556.1, AL080137.1, AL050138.1, AL137521.1, |
| | | | | | BC006195.1, AL122049.1, |
| | | | | | AB055374.1, AL049300.1. |
| HKB1E57 | 123 | 876571 | 1-1128 | 15-1142 | AL518848, BE795484, BE790580, BE793563, AI005330, |
| | | | | | AL530857, BE865465, BE740884, BG259765, |
| | | | | | BE559709, AW972157, BE793925, BF732476, AI523173, |
| | | | | | AI133648, BF132480, AA741065, BE266365, |
| | | | | | AW246779, AA483640, AI553793, AA889963, AW731821, |
| | | | | | AW376863, AI457636, AU159951, |
| | | | | | AI076501, BE865290, AW250974, BF683810, AI245539, |
| | | | | | AI160351, AA122216, N70566, AI123318, |
| | | | | | W04730, AI298575, AI094218, BF840014, AI298397, |
| | | | | | AA627412, AW474453, BF063304, AI304872, |
| | | | | | W80875, BE645309, AI829879, AA877594, AW514292, |
| | | | | | AA721451, AI032434, AA564388, AA723454, |
| | | | | | AW571641, AW591598, AW605095, AA404537, BF326544, |
| | | | | | H07869, F13805, AI055951, AA122217, |
| | | | | | AV693323, AA308813, AI474982, T08020, AI678622, |
| | | | | | AA284386, AW839757, AW189626, AL530858, |
| | | | | | BE393850, W80766, BE143803, AA706470, AA319710, |
| | | | | | AA480437, BE936534, BE166705, AW051083, |
| | | | | | AA121863, AI432644, AI927233, AI687607, AI924051, |
| | | | | | AI431307, AI623302, AI431316, AI431238, |
| | | | | | AI539800, BE897632, AI590043, AI289791, BE883591, |
| | | | | | BG167830, AI285417, AI866786, AI687588, |
| | | | | | AI537677, AI494201, AI872315, AI500659, AI866465, |
| | | | | | AI815232, AI801325, AI500523, AI538850, |
| | | | | | AI887775, AI582932, AI923989, AI284517, AI872423, |
| | | | | | AI440260, AI500706, AI445237, AI491776, |
| | | | | | AW151138, AI889189, AI521560, AI500662, AW151974, |
| | | | | | AI567971, AI804505, AI815239, AW172723, |
| | | | | | AI284509, AI582912, AI538885, AI440263, AI889168, |
| | | | | | AI866573, AI633493, AI434256, AI866469, |
| | | | | | AI434242, AI805769, AI866691, AI888661, AI500714, |
| | | | | | AI284513, AI888118, AI285439, AI859991, |
| | | | | | AI436429, AI355779, AI623736, AI889147, AI581033, |
| | | | | | AI371228, AW194509, AI491710, AI440252, |
| | | | | | AI926593, AI440238, AI860003, AI610557, AI242736, |
| | | | | | AW058275, AI828574, AI887499, AI539781, |
| | | | | | AI539707, AI702065, AI885949, AI285419, AW089557, |
| | | | | | AI559957, AI521571, AI469775, AI866581, |
| | | | | | AI866503, AW151132, AI539260, AI567953, AI815150, |
| | | | | | AI446495, AI431321, AI867068, AI932620, |
| | | | | | AI890907, AW074057, AL042729, AI889191, AI952433, |
| | | | | | AI225248, BE885490, AI358271, AI798359, |
| | | | | | AI282249, AI698352, BF812963, AI371229, BG252929, |
| | | | | | AI539771, BF811804, AI561170, AL042595, |
| | | | | | AW151979, AI284516, AI432666, AI289101, AW858522, |
| | | | | | BF814072, BF811802, AL039508, |
| | | | | | AW151136, AI866458, BG029667, AI371251, AI493559, |
| | | | | | AI866510, BG249858, BE826157, BG113493, |
| | | | | | AI866461, AI923046, BG110517, AI687944, BG176609, |
| | | | | | AL047611, AI955221, BG257535, AI889157, |
| | | | | | AL039390, BF795712, AI559976, AI690946, AI567947, |
| | | | | | AI436438, BG253986, AI648567, AL042787, |
| | | | | | AL134524, AI433157, AI362495, AI371243, BF796402, |
| | | | | | AI288076, AL515375, AL042853, AI469764, |
| | | | | | AV736134, AI432653, AI431323, BE886728, AL042655, |
| | | | | | AV736402, BF815930, AK023992.1, |
| | | | | | AK027449.1, BC001215.1, AF152097.1, AL355392.7, AL136763.1, |
| | | | | | AL133049.1, AL133053.1, |
| | | | | | AL136825.1, AL133607.1, AL133076.1, AL122101.1, AL049423.1, |
| | | | | | AL133084.1, AL133070.1, |
| | | | | | AL133655.1, AL136765.1, AL136781.1, AL110223.1, AB048910.1, |
| | | | | | AK026784.1, AL133074.1, |
| | | | | | BC008781.1, BC007294.1, AL133015.1, AL133608.1, AL136828.1, |
| | | | | | AK026927.1, AF002985.1, |
| | | | | | AL162008.1, AL117445.1, BC008983.1, AL157482.1, AL122049.1, |
| | | | | | BC004991.1, AF082324.1, |
| | | | | | AL133051.1, AB049849.1, AL136808.1, AF057300.1, AF057299.1, |
| | | | | | AB047623.1, AK026480.1, |
| | | | | | AK025860.1, AL049557.19, BC003108.1, AL512733.1, AK025484.1, |
| | | | | | AL512765.1, AC004213.1, |
| | | | | | AC006039.2, AK000225.1, BC000649.1, BC004314.1, AB047941.1, |
| | | | | | AL049300.1, BC000253.1, |
| | | | | | BC004530.1, AL080139.1, AK026912.1, AL389947.1, AL354864.16, |
| | | | | | AB047953.1, AL162062.1, |
| | | | | | AL137485.1, AL137254.1, AL353092.6, BC000009.1, AK000486.1, |
| | | | | | AC008755.6. |
| HKGDL36 | 125 | 877489 | 1-1038 | 15-1052 | BF966686, BF969262, BE798423, BE383172, BG108317, |
| | | | | | BF438085, BF967072, BF724971, BF310167, |
| | | | | | BF437374, BF525713, BF725537, BE312863, BE327726, |
| | | | | | BF526596, BF983368, BF966496, BE392518, |
| | | | | | BE045542, AI261620, AI628667, AI955247, AI796185, |
| | | | | | AW024651, BF724972, AI365220, AI767645, |
| | | | | | BE551437, AW051507, AI199503, AI418919, BF724666, |
| | | | | | AI039610, AW162506, AI955309, BE673721, |
| | | | | | AW138191, AI969138, AW583447, AI373491, AI696987, |
| | | | | | AW583390, AI952012, AW341037, |
| | | | | | BF310234, AI758216, BF438130, AW013963, AI955147, |
| | | | | | BE669440, AI768473, D61105, BF592013, |
| | | | | | AI355910, AI969092, AI913491, AW027769, AI423438, |
| | | | | | AI968975, AI479582, AW090177, H41372, |
| | | | | | AI927970, AW300071, AI400855, AI348277, AW771649, |
| | | | | | AI672352, AI991536, AI421291, BF739771, |
| | | | | | AW103643, AA894790, BF197412, BF724667, BF197448, |
| | | | | | AW583609, AW000953, AW299323, |
| | | | | | AI498193, AA199635, D59847, AV748923, AI560270, |
| | | | | | AI625846, AI493832, AW590037, AW955700, |
| | | | | | AI702136, AA877175, AW583672, AA757536, D59877, |
| | | | | | AA706516, AW393735, D60795, D80419, |
| | | | | | AI302316, AI248555, D80214, D80684, AI927667, |
| | | | | | AI627691, AA989221, BE464388, D59878, |
| | | | | | BE218723, BF346124, AI985164, AW000934, BF967708, |
| | | | | | AW001692, AI701771, D59848, D59725, |
| | | | | | AA873392, AA364835, BF431598, H92678, AW135417, |
| | | | | | AI589246, AW072965, AW163721, AI916619, |
| | | | | | BF752892, BE964512, AL515163, AW022102, AI783861, |
| | | | | | AL513839, AA600801, BE621073, |
| | | | | | BE544111, BF815196, BF910849, BE963809, BF814409, |
| | | | | | BE784387, BF840099, BE963918, BG170109, |
| | | | | | BE613727, BE880341, BF814360, AW005029, BF921092, |
| | | | | | AV712606, AV681927, BE967251, |
| | | | | | BE964621, AI866741, AW059713, BG108334, BE536377, |
| | | | | | BF929585, AI254754, BF764538, AA824513, |
| | | | | | AW083804, AI539462, BF129016, AI446605, AL513741, |
| | | | | | AA830821, BE966699, AI924035, AI445976, |
| | | | | | BE875966, AI242248, BE885353, BE538466, AI620093, |
| | | | | | AI537643, AI358042, BE880697, AI683255, |
| | | | | | AI591412, AI591081, W81248, AI536910, BE964962, |
| | | | | | AW834325, AI864827, BE048026, AI872159, |
| | | | | | BE061389, BE964767, AI591057, AW073868, AI863256, |
| | | | | | AI690449, BE907440, AI884574, F35927, |
| | | | | | BE878032, BE965121, N95566, AV743128, AV706465, |
| | | | | | AI445588, BE899377, AI934000, AI280670, |
| | | | | | AI583578, AI627714, AI500039, AV708075, BE900603, |
| | | | | | BF752858, AW265004, AI623682, BF341610, |
| | | | | | AW079032, AI925736, AI252077, AI590787, AW025533, |
| | | | | | AI267185, BG105895, BE964600, AL513789, |
| | | | | | F26535, AL048377, BE965527, BE967255, BE964799, |
| | | | | | AW946864, AL514167, AI627880, BE621140, |
| | | | | | AV710267, AI678302, AI926878, BE878028, AI633300, |
| | | | | | BF817402, BF753053, BE875407, BF752999, |
| | | | | | AI689614, AI624668, BE966390, AI811192, AI866002, |
| | | | | | F28295, BG260275, BE963286, BF753056, |
| | | | | | BC002851.1, AF181562.1, AF196971.1, AJ012582.1, BC003104.1, |
| | | | | | BC007248.1, BC001470.1, |
| | | | | | AF230402.1, BC002948.1, AF352728.1, U77594.1, AK000212.1, |
| | | | | | AB063077.1, BC003687.1, |
| | | | | | BC004314.1, AK026865.1, AK025491.1, BC001294.1, AB060908.1, |
| | | | | | AK025906.1, AL137557.1, |
| | | | | | AL136752.1, AK000598.1, AL121656.2, BC002816.1, BC002356.1, |
| | | | | | AJ010277.1, BC002397.1, |
| | | | | | BC004529.1, AL157464.1, BC000785.1, BC000725.1, X95876.1, |
| | | | | | AB060832.1, BC004324.1, |
| | | | | | AL080162.1, BC002777.1, AF022813.1, AK027113.1, BC004370.1, |
| | | | | | AB055374.1, AL137556.1, |
| | | | | | AK024601.1, AK026164.1, AL512705.1, AK026613.1, BC008417.1, |
| | | | | | AL512746.1, AL136780.1, |
| | | | | | AL136864.1, BC001969.1, BC004310.1, BC000235.1, AF028823.2, |
| | | | | | AF112208.1, AL136767.1, |
| | | | | | BC003602.1, BC005890.1, AL137665.1, BC004417.1, AL137547.1, |
| | | | | | AF218034.1, AB049629.1, |
| | | | | | AF239683.1, AL136799.1, BC008196.1, BC006251.1, AK026590.1, |
| | | | | | AL049347.1, AK026603.1, |
| | | | | | AL389978.1, AL049460.1, S77771.1, AL512719.1, BC004937.1, |
| | | | | | BC005678.1, BC001093.1, |
| | | | | | AF225424.1, AB063071.1, AB060214.1, AB047904.1, BC002557.1, |
| | | | | | Y16645.1, AB060893.1, |
| | | | | | BC001349.1, AL137459.1, BC004195.1, AL512718.1, BC001963.1, |
| | | | | | AF111847.1, AB060914.1, |
| | | | | | AL353935.1, AL136766.1, AK026600.1, BC002491.1, BC000778.1, |
| | | | | | AL096720.1, AL359622.1, |
| | | | | | AL049314.1, AB047941.1, AK025119.1, BC004333.1, AF205861.1, |
| | | | | | AL133568.1, AL136586.1, |
| | | | | | M92439.1, AL136790.1, AL117648.1, AL137657.1, AF069506.1, |
| | | | | | BC007207.1, AL133081.1, |
| | | | | | BC004202.1, BC005931.1, AB060839.1, AL080137.1, AB056768.1, |
| | | | | | M79462.1, AK025410.1, |
| | | | | | AL390167.1, AK026533.1, AF090934.1, BC003052.1, BC005151.1, |
| | | | | | BC000217.1, BC008488.1, |
| | | | | | AL162062.1, BC004131.1, AL136842.1, BC009294.1, AB019565.1, |
| | | | | | BC000348.1, AK024594.1, |
| | | | | | AF188698.1, AL122050.1, BC004530.1, AF132676.1, AB056427.1, |
| | | | | | BC006440.1, AF061836.1, |
| | | | | | BC000772.1, BC006458.1, AF217991.1, BC003410.1, AL389935.1, |
| | | | | | BC006133.1, AF348209.1, |
| | | | | | AL353625.5, BC002911.1, X66975.1, AK024570.1, AK000450.1, |
| | | | | | BC008070.1, AK024533.1, |
| | | | | | AB048888.1, AK000432.1, AL133645.1, BC004899.1, AL359596.1, |
| | | | | | BC002535.1, AK026741.1, |
| | | | | | BC004383.1, AF271781.1, AL117585.1, AB044547.1, AB063079.1, |
| | | | | | AK000310.1, AF036268.1, |
| | | | | | AB049758.1, AL080074.1, AL442082.1, U42766.1, BC004926.1, |
| | | | | | BC004960.1, BC005872.1, |
| | | | | | AL049339.1, AF358829.1, AK026086.1, BC003650.1, AB047897.1, |
| | | | | | BC002798.1, BC007674.1, |
| | | | | | AB055366.1, AB060929.1, AK025239.1, BC005854.1, BC002342.1, |
| | | | | | AL359623.1, AL110225.1, |
| | | | | | AL122118.1, AF321617.1, AC025226.4, AK026649.1, AF271350.1, |
| | | | | | AK026045.1, AK000652.1, |
| | | | | | AK000445.1, AL133062.1, BC002519.1, BC004297.1, BC006106.1, |
| | | | | | BC000094.1, AL136828.1, |
| | | | | | AL137648.1, BC006196.1, BC002343.1, BC006494.1, BC000316.1, |
| | | | | | AB060226.1, AL157483.1, |
| | | | | | AK027142.1, AK000323.1, AK025517.1, BC008025.1, AL353956.1, |
| | | | | | BC002476.1, AL050092.1, |
| | | | | | AL096751.1, U91329.1, AF081197.1, AF081195.1, AK025383.1, |
| | | | | | BC005002.1, AC006357.5, |
| | | | | | AL080060.1, BC001762.1, BC000386.1, BC005858.1, AB049849.1, |
| | | | | | BC002539.1, AL162008.1, |
| | | | | | AK024538.1, BC005007.1, BC002647.1, AB047887.1, AB047623.1, |
| | | | | | AB060873.1, BC004265.1, |
| | | | | | AK027081.1, BC001293.1, BC008485.1, BC001045.1, AK027164.1, |
| | | | | | AL136644.1, AL122098.1, |
| | | | | | AK000655.1, AK000421.1, S69510.1, AL137284.1. |
| HKISB57 | 126 | 625956 | 1-1478 | 15-1492 | BG253059, AI888563, AW083174, AI890983, BE677527, |
| | | | | | AI742994, AA581853, BE208188, AA496043, |
| | | | | | AI749573, AI433172, AA912116, AU152415, AU151244, |
| | | | | | AA526295, W72233, AI708515, AA029171, |
| | | | | | AI289783, AA147482, AW001857, BE744941, BF851250, |
| | | | | | W76470, AI148076, AI619715, W32695, |
| | | | | | AI973179, BF856405, AA086231, AI536682, AI244167, |
| | | | | | AW205328, AA112137, AI015550, AI159953, |
| | | | | | AA449234, AA449289, AI886087, R48602, AW974749, |
| | | | | | R48705, N57904, W73612, AA515533, |
| | | | | | AI095398, AA086322, AA554446, AA317019, BE019888, |
| | | | | | R07096, AA894669, AA112027, T96414, |
| | | | | | AA923651, T96497, AI581984, AI093238, AW084446, |
| | | | | | BE834394, T65129, AA100811, BF767404, |
| | | | | | AA652428, W32694, AW364698, BF371383, AW390788, |
| | | | | | AI903419, AI903380, AI903350, AA300051, |
| | | | | | AW886927, H55267, AA029067, AA588851, AA588463, |
| | | | | | BF931116, BE646329, AW514396, T65909, |
| | | | | | AW578218, AW800794, R07042, AA625855, AA663955, |
| | | | | | AA687595, AI581808, R76016, W22074, |
| | | | | | AA043407, AA436950, H39017, BF814527, AI824576, |
| | | | | | AI702073, AI698391, AW080090, AI633062, |
| | | | | | AI608936, BE786043, AI358213, AI306705, AW983832, |
| | | | | | BE963838, BG179993, AW051258, AI677796, |
| | | | | | AW051088, BF856017, AI932794, AI366900, AI352497, |
| | | | | | AI889189, AW983829, AI270183, AW163834, |
| | | | | | AL514731, AI434468, AI812015, AI249877, AI679672, |
| | | | | | AW118518, BF812960, AI284131, AW029611, |
| | | | | | AI468872, AI699011, AI927755, BF792961, BE966388, |
| | | | | | AI886753, AW827289, AI564719, AV743962, |
| | | | | | BG108406, AI567846, AV741327, AI573060, AI783504, |
| | | | | | BG112718, AI620284, AI866770, AW198075, |
| | | | | | BF032768, AW083778, AL514899, AI611738, AI280732, |
| | | | | | AI619502, AI680162, AI802542, AW081255, |
| | | | | | AI280607, AI499285, AI570807, AW004886, AI452560, |
| | | | | | AW026882, AW151136, AI923370, AI627988, |
| | | | | | BF812938, AL118781, BF970652, BE789764, AW104724, |
| | | | | | AI670009, AI863382, AI433157, BE543089, |
| | | | | | BF812961, AI452993, AI624548, AI659795, AW079572, |
| | | | | | AI860783, AI633125, BF812426, F27788, |
| | | | | | AW089179, AI673785, AI915291, AI354998, AW152182, |
| | | | | | AI537024, AI917252, BE967261, BF725599, |
| | | | | | AW080746, AL120853, AW129659, AW163554, AI537677, |
| | | | | | AI499890, AI612852, BF526020, |
| | | | | | AI174394, AW192461, AI613270, AW105620, AL119863, |
| | | | | | AI520809, AI923989, AL036673, AI571909, |
| | | | | | AI803778, AI653979, BG036846, AW192687, AV682249, |
| | | | | | AL514357, AW839006, AI274507, AI632408, |
| | | | | | AI288305, AI635067, BG180273, AI612913, AL119828, |
| | | | | | AV682212, AI590686, AI435268, AI432030, |
| | | | | | BE048071, AI500588, AI628217, BE047606, AI637748, |
| | | | | | AW238688, BG029829, AF064238.3, |
| | | | | | AJ010306.2, Y13492.2, Z49989.1, AF115564.1, AF115570.1, |
| | | | | | AF115567.1, AF115569.1, |
| | | | | | AF115568.1, AL122098.1, AL137533.1, AB056420.1, BC006195.1, |
| | | | | | BC005858.1, AK024524.1, |
| | | | | | AL133067.1, AK025092.1, BC001045.1, AL137550.1, AL080159.1, |
| | | | | | AK026462.1, AK024538.1, |
| | | | | | AL512733.1, AL050277.1, AL389939.1, S61953.1, AB056421.1, |
| | | | | | BC008893.1, AL137294.1, |
| | | | | | BC001963.1, AL389982.1, AF026816.2, AL136844.1, AB060852.1, |
| | | | | | BC008488.1, Y14314.1, |
| | | | | | AF260566.1, AL136805.1, AL049283.1, AL512684.1, AK025209.1, |
| | | | | | AK026593.1, X82434.1, |
| | | | | | AK026542.1, X72889.1, AL137560.1, AL137271.1, BC004951.1, |
| | | | | | AB060916.1, AK026532.1, |
| | | | | | AF183393.1, AL137478.1, AL137556.1, AL583915.1, AK025484.1, |
| | | | | | AF057300.1, AF057299.1, |
| | | | | | AK000652.1, AF348209.1, AL353625.5, AK026480.1, AF218014.1, |
| | | | | | AF225424.1, Z82022.1, |
| | | | | | AK027213.1, AK027164.1, AK027160.1, AF056191.1, BC003122.1, |
| | | | | | AF111112.1, AB048974.1, |
| | | | | | AB062938.1, AL050393.1, AK026534.1, AL122049.1, AL136915.1, |
| | | | | | AB055361.1, AK025632.1, |
| | | | | | AL122100.1, BC006525.1, AL110225.1, AL133568.1, BC004556.1, |
| | | | | | AL136892.1, BC008365.1, |
| | | | | | BC005678.1, AL080124.1, AK026408.1, AL162002.1, AL122110.1, |
| | | | | | AK026533.1, U39656.1, |
| | | | | | AL136893.1, AL050149.1, AK000418.1, AJ299431.1, AB047904.1, |
| | | | | | AL122093.1, AL050138.1, |
| | | | | | AL133560.1, AL137463.1, AL136749.1, BC006807.1, AL133557.1, |
| | | | | | AF262032.1, AB049758.1, |
| | | | | | AK000323.1, AF146568.1, AF162270.1, AL133113.1, AK025465.1, |
| | | | | | AL133072.1, AF091084.1, |
| | | | | | AK026583.1, AK026642.1, AL133640.1, AL359583.1, AK026744.1, |
| | | | | | AK025084.1, L30117.1, |
| | | | | | AK000083.1, AL133016.1, AK025708.1, AL353940.1, AL442082.1, |
| | | | | | U80742.1, AK000718.1, |
| | | | | | AL110280.1, AK026865.1, AL512750.1, AL162083.1, AF090934.1, |
| | | | | | AB048919.1, AL359620.1, |
| | | | | | AL050172.1, AL359618.1, BC004958.1, BC003682.1, AB046642.1, |
| | | | | | AL110221.1, BC006164.1, |
| | | | | | BC003684.1, AL512765.1, AL122121.1, AL137292.1, AF271350.1, |
| | | | | | AL137476.1, AK000391.1, |
| | | | | | BC008417.1, U58996.2, AB063084.1, AB056809.1, AF090900.1, |
| | | | | | AF242525.1, AL353956.1, |
| | | | | | AK026551.1, AL080148.1, AL117435.1, BC009033.1, AK024588.1, |
| | | | | | AL137557.1, AK026528.1, |
| | | | | | AK000432.1, BC006440.1, AK026947.1, AK027204.1, AB047801.1, |
| | | | | | AL117457.1, AL050116.1, |
| | | | | | AL136586.1, AL137480.1, AJ006417.1, AF061573.2, BC009341.1, |
| | | | | | AJ012755.1, AL512718.1, |
| | | | | | BC008070.1, AK027096.1, BC008899.1, AB056427.1, AF217987.1, |
| | | | | | AB048954.1, BC006494.1, |
| | | | | | AK026762.1, AK027182.1, AL512689.1, BC002733.1, AK027116.1, |
| | | | | | AL133075.1, AL133093.1, |
| | | | | | U78525.1, AL136787.1, BC008387.1, AF106862.1, AL080060.1, |
| | | | | | AL359941.1, AK000445.1, |
| | | | | | AB060826.1, BC005890.1, AB048953.1, AB050410.1, AB050510.1, |
| | | | | | AK026629.1, AK026045.1, |
| | | | | | AB050534.1, AF177336.1, AK025414.1, AL117460.1, AL136768.1, |
| | | | | | AF090903.1, AB052200.1, |
| | | | | | AK026927.1, AL117440.1, AY033593.1, AL133565.1, AL390167.1, |
| | | | | | L19437.2, AK026592.1, |
| | | | | | AK024601.1, AB063008.1, AB055374.1, AK025958.1, AJ242859.1, |
| | | | | | AF113222.1, BC009212.1, |
| | | | | | AK026452.1, AK025254.1, AB060214.1, AL110222.1, X53587.1, |
| | | | | | AK026959.1, AL162008.1, |
| | | | | | AF218031.1, BC005151.1, AB047615.1, BC004370.1, BC006103.1, |
| | | | | | AY034001.1, AK000486.1, |
| | | | | | AL133098.1, BC003548.1, AL050108.1, AL122118.1, AB062978.1, |
| | | | | | AL136789.1, AL049452.1, |
| | | | | | AK025391.1, BC008284.1, AK000647.1, AL136786.1. |
| HKMMW74 | 127 | 581399 | 1-1780 | 15-1794 | AI524360, AA582463, AW970030, AW088049, BF845261, |
| | | | | | AV744082, BG166773, BF970654, |
| | | | | | AL137859.3, AC008784.6, AC022382.3, AC079844.3, AB038490.1, |
| | | | | | AC007917.15, |
| | | | | | AL158070.11, AL136231.12, AP000555.1, Z96074.4, AC006430.22, |
| | | | | | AP001695.1, AL354811.13, |
| | | | | | AC078958.30, D87675.1, AL138849.12, AC004019.20, AL391415.12, |
| | | | | | AC079950.23, |
| | | | | | AL117694.5, AC004935.1, AL121834.20, AL109921.21, AC008551.5, |
| | | | | | AF200465.1, AC008892.5, |
| | | | | | AC068799.14, AC006036.3, AC005725.1, AC015982.9, AL391262.3, |
| | | | | | AC004104.1, AC005079.6, |
| | | | | | AL132988.4, AP000692.1, AL590116.8, AL158144.15, AC005305.1, |
| | | | | | AC003049.1, AL022313.1, |
| | | | | | AC005520.2, AL353135.32, AL117377.18, AC025887.4, AC004468.1, |
| | | | | | AC083876.2, |
| | | | | | AC004774.1, AC004634.1, AL121900.26, AC034198.6, AC006460.3, |
| | | | | | AC005522.2, AC018828.3, |
| | | | | | AC067742.5, AC022383.3, AL161655.8, AL445686.14, AL031224.1, |
| | | | | | AP000128.1, AP000206.1, |
| | | | | | AL021154.1, AC009006.6, AF111167.2, AL589782.7, AL590785.7, |
| | | | | | AC021016.4, AL133387.8, |
| | | | | | AC006115.1, AC026439.3, AL034394.2. |
| HLDON23 | 129 | 636083 | 1-1248 | 15-1262 | AL529086, BE904120, BF337766, BF345489, AV706125, |
| | | | | | AI681123, BF002270, BF055322, BE856092, |
| | | | | | BE305227, BE219427, BF438375, BG149525, BF057786, |
| | | | | | BF590112, BF196165, AI741848, AI636347, |
| | | | | | AI973055, AI554720, AI871117, BE220195, AI745311, |
| | | | | | AW192924, AW340966, AA706712, AI091179, |
| | | | | | BF445900, BE645773, AI677802, AI889659, AI804323, |
| | | | | | AI688189, AW673266, AI298377, BE046787, |
| | | | | | AA535027, AW612722, AI830304, AW675294, AI139157, |
| | | | | | AW089901, AA410579, AW073842, |
| | | | | | AW316637, AA417232, AA416567, AI827376, AI372513, |
| | | | | | AA411560, AW001905, AI796719, |
| | | | | | AW673062, AI334363, AI085075, AI400032, AI452964, |
| | | | | | AA308319, AI888902, AI400560, T33187, |
| | | | | | AA877699, AI332395, AI372512, AA485507, AA017127, |
| | | | | | BG178589, R85136, AV705959, AL526358, |
| | | | | | BG056798, H94860, BF476221, AW016699, BF594282, |
| | | | | | R18537, AA988884, AI925753, AA993373, |
| | | | | | AW953175, W05059, AI263531, AA282629, F29641, |
| | | | | | R01402, AA625328, AA126985, AA354334, |
| | | | | | H58095, BE251679, AW662030, AI559961, AW337874, |
| | | | | | AA282410, AI014243, AI671403, R41526, |
| | | | | | AA485352, R43109, Z39066, BF925559, F04091, |
| | | | | | R01401, W04796, AV751453, BE871534, AA128150, |
| | | | | | AW375092, BF237662, BE155754, T25085, F17839, |
| | | | | | AW371533, N74669, AW058382, AW371557, |
| | | | | | BF063353, AL360256.1, AL117482.1. |
| HLDQR62 | 130 | 753742 | 1-2558 | 15-2572 | BE876197, AU133975, AW170131, AV723948, BG178057, |
| | | | | | AV652458, AW836234, AW608052, |
| | | | | | AA047046, BF104746, AA486037, BE395776, AW385580, |
| | | | | | AA488655, BE699041, AA932253, |
| | | | | | BG104619, BF671350, AA854943, AA418105, AA829456, |
| | | | | | AA243385, BE699051, BE936060, |
| | | | | | AI346694, AA418007, AA503398, AA053835, AW067836, |
| | | | | | AA878478, AI309218, BF820483, |
| | | | | | AA287990, W37960, AI401102, AI279485, W37900, |
| | | | | | AI423510, AA610711, AI050735, BF939011, |
| | | | | | BE699047, AA701403, W30974, AA017371, AW385388, |
| | | | | | AA911160, BF928600, H10281, W32542, |
| | | | | | AA133579, AV721259, H81907, BE908122, H11712, |
| | | | | | AA657490, H09562, R97956, BF810354, N68428, |
| | | | | | BF841567, AA018681, BF810349, AW838671, AW274397, |
| | | | | | BE699044, BF737894, H17436, AA133578, |
| | | | | | T03483, BF529092, BE699011, R93915, T84200, |
| | | | | | H10225, R97955, N91220, F09018, BE244933, |
| | | | | | BE697384, AW474873, Z43397, AA677745, F11358, |
| | | | | | AW838680, Z42508, H08994, H11779, R18755, |
| | | | | | AW067888, H86384, R20010, R44826, T78746, |
| | | | | | BE546845, BF768165, AA676360, Z41104, R12303, |
| | | | | | R61069, H80952, H01770, BF362799, AA857228, |
| | | | | | BE092626, AW361033, BE246721, R12953, F11514, |
| | | | | | AA298600, AA233314, H82000, Z45386, AA047038, |
| | | | | | AA988879, AA776420, R61792, BF925722, |
| | | | | | F02025, H37922, AA946813, AA058662, BE793798, |
| | | | | | AA298811, AW954042, AI024907, AA515707, |
| | | | | | AA579408, C02381, H38137, H80857, AA190438, |
| | | | | | AA059270, AW953912, W32541, AI253018, |
| | | | | | BF755527, AA252608, H39230, BF087406, BF841077, |
| | | | | | BE699066, F09175, AW608049, R36072, |
| | | | | | AW607934, AW242636, F02790, AA018740, BE092426, |
| | | | | | N47523, AW951415, BE872758, AA670010, |
| | | | | | BF793691, H86054, BE699208, AA017201, AA059226, |
| | | | | | BE857637, BG011131, AA233315, AW169463, |
| | | | | | BE935974, AA910836, BF756516, AA504287, AA489248, |
| | | | | | AW452612, BE858890, BE699076, |
| | | | | | AA953019, AA191764, BF930488, BE746764, AA552521, |
| | | | | | BF932022, BE080981, AW385586, |
| | | | | | BE092405, BE047109, AW838675, BE074538, AB046801.1, |
| | | | | | AC026749.5, AC026437.5, |
| | | | | | AC010491.3, AK001799.1, AF274753.1. |
| HLDQU79 | 131 | 740755 | 1-1474 | 15-1488 | BG256275, BE867624, BE907396, BE855521, BF034422, |
| | | | | | BF530803, AW959247, BE782005, AI126689, |
| | | | | | AL121446, AA757065, AW630129, BF768037, BE746763, |
| | | | | | AA206154, AA460401, AI276320, |
| | | | | | BF998689, AA295243, BE242732, BG035901, AL040350, |
| | | | | | BE242810, T86168, BF983867, W05088, |
| | | | | | AA347337, BG252443, AI133502, AF064093.1. |
| HLHAL68 | 132 | 684216 | 1-690 | 15-704 | AA359084, AC018797.4, AF224669.1, AF283321.1, AC007883.3, |
| | | | | | AC006038.2, AC034251.5, |
| | | | | | AC006345.4, AC008149.14, AL355392.7, AC006057.5, AC084864.2, |
| | | | | | AL354720.14, |
| | | | | | AC084865.2, AC006435.7. |
| HLIBD68 | 133 | 778073 | 1-1008 | 15-1022 | AL538046, BF975484, BG260893, BF062040, AW250850, |
| | | | | | AW954319, BG118275, AI633756, |
| | | | | | AI436560, BE646174, AA975057, AW302253, AI651397, |
| | | | | | AI825665, AI479926, AI635567, AI612806, |
| | | | | | AI640598, AI653427, AI248825, BF770160, AI333221, |
| | | | | | AA609320, AI916748, BF346659, AW001438, |
| | | | | | BF941021, AA397893, AI083783, AA399663, AA302889, |
| | | | | | AA484860, AI659648, BF222019, AI692578, |
| | | | | | R49550, AW016187, AA393712, AI673346, D80738, |
| | | | | | D81106, D81495, D81643, C15479, AI696498, |
| | | | | | C15522, R42643, AI761655, AA302888, D81794, |
| | | | | | D81487, D60344, AA302884, AA302883, BF813253, |
| | | | | | AA091824, BE743563, N49704, AI476597, D81533, |
| | | | | | N87760, BE396027, AA352126, AA281538, |
| | | | | | AA280240, AL133447.1. |
| HLICQ90 | 134 | 791828 | 1-1752 | 15-1766 | BF980403, BF726329, AI984197, AI192533, AI559494, |
| | | | | | AI378638, AA430026, AI061413, AW172705, |
| | | | | | BG165333, AI190915, AA430235, N62729, AI689890, |
| | | | | | AI360764, AA705532, H90333, H30177, T99745, |
| | | | | | H78217, T86019, H26993, T91236, AV645894, |
| | | | | | AA330598, N75483, H42449, BE766728, AW135351, |
| | | | | | AA976652, AA383620, BE220880, AI630095, BF381551, |
| | | | | | BF767606, BE087130, H42847, W05293, |
| | | | | | AA911697, AI659925, BE766726, H82733, T99746, |
| | | | | | BF889067, AW955970, AW971740, AI432644, |
| | | | | | AI431328, AI623302, AW968355, AI431347, AW972091, |
| | | | | | BE672759, AI432653, AI431230, AI432654, |
| | | | | | AI432655, AI431310, AI431312, AW081103, AI432677, |
| | | | | | AW968356, AI431323, AW972093, |
| | | | | | AW968729, AI431354, AI432661, BE672719, AI431307, |
| | | | | | AI431316, BE672732, AI431337, AI432650, |
| | | | | | BE672745, BE672748, AI431238, AI492519, AI432675, |
| | | | | | AI431350, AI431231, BE672767, AW972092, |
| | | | | | AI432651, AI432647, AI431243, AI431330, BF448552, |
| | | | | | BE672742, AI432662, AI431248, BE672644, |
| | | | | | AI432657, BE672774, AI432649, AW972090, AI791349, |
| | | | | | AI431257, AI432665, AI431247, AI431318, |
| | | | | | BE672738, BE672792, AI431235, AI431321, AI431315, |
| | | | | | AI431246, AI432643, BE672743, AL042519, |
| | | | | | BE672640, AW129223, AL042931, BE672622, BE672627, |
| | | | | | AI492510, AL042729, AL042832, |
| | | | | | AL047611, BE672754, BE672626, AL043295, AL357075.17, |
| | | | | | AF064854.1, AL133082.1. |
| HLQDR48 | 135 | 1307726 | 1-975 | 15-989 | AV655891, AV718605, AV690404, AV719284, AA923549, |
| | | | | | AI950351, AV656411, AV720179, |
| | | | | | AV654765, AV656119, AV697855, BF511595, AC011472.7, |
| | | | | | AF271350.1. |
| HLTHR66 | 136 | 699812 | 1-2272 | 15-2286 | AW978874, BF507862, BF033134, AL135232, AI673052, |
| | | | | | AW612437, AW880652, BF508030, |
| | | | | | AW118937, AI912990, AI651420, AI754531, AI285856, |
| | | | | | BF431306, AI760176, AI805972, BF511821, |
| | | | | | AI123209, AW001864, AI377932, AI141443, AI743946, |
| | | | | | H19020, BE857717, AW962968, AI221575, |
| | | | | | AA588506, BF475287, AA026012, AI249502, AI660528, |
| | | | | | AI949710, R68887, AV653095, AA026000, |
| | | | | | R77684, H19313, AI460280, AA829761, AA357748, |
| | | | | | BF511571, R77685, BE671786, AA084602, |
| | | | | | AI687732, AW889295, BE002919, AI812062, BF365444, |
| | | | | | C21025, AL136231.12, AF147395.1. |
| HLTIP94 | 137 | 1087335 | 1-1226 | 15-1240 | AA552985, AA314716, BE778519, BE894256, BE779796, |
| | | | | | AA228139, AI802948, AC005325.1. |
| HLWAA17 | 138 | 629552 | 1-983 | 15-997 | AL522002, BF305304, AL521608, BE732838, BE899550, |
| | | | | | BF344719, BG115015, BG109203, BF982386, |
| | | | | | BE410162, BE735023, BE901175, BG117962, BE281306, |
| | | | | | BG165427, BF793440, BE901577, BE872442, |
| | | | | | BF316646, BE409982, BF982251, BF970528, BE262711, |
| | | | | | BE299415, BF340859, BE386152, BF569778, |
| | | | | | BE281612, BF305644, BG251248, BF673757, BF183244, |
| | | | | | BE547252, AL521166, BF237978, BG249255, |
| | | | | | BE280374, BE301893, BG109330, BG164142, AL522550, |
| | | | | | BE018945, BG170896, AW732476, |
| | | | | | BE779176, BE018944, AL532064, AW250139, AA580387, |
| | | | | | H20615, BE741195, BE736037, BE272171, |
| | | | | | AI752100, BE870251, BE742694, BE883834, Z42865, |
| | | | | | W21970, AA873793, AW579408, BF753347, |
| | | | | | AA204913, AA206511, AA158660, BF971112, H66924, |
| | | | | | R25678, AA233944, BE743048, BE743976, |
| | | | | | BF304498, BE546682, BG112068, BF317329, BE278514, |
| | | | | | BF878947, BE744899, Z25248, BG248593, |
| | | | | | AW675147, T56764, AA368717, BE793472, AW956985, |
| | | | | | BE246887, BE298316, BE410692, BE707861, |
| | | | | | BF125052, BE388318, BF970723, BF675911, BE868990, |
| | | | | | BF031826, AA380216, AJ271671.1, |
| | | | | | BC007886.1, BC002563.1, AJ243649.1, BC003152.1, AF151829.1, |
| | | | | | AF132942.1, AJ243650.1, |
| | | | | | AC004832.3, AC005585.1. |
| HLWBK05 | 139 | 765310 | 1-2369 | 15-2383 | AL536493, AL514199, AL157671, BG260370, BE379053, |
| | | | | | BG252836, AL529147, AL515380, |
| | | | | | AL514200, BG104666, BG114729, AL529146, BF967759, |
| | | | | | BF527200, BF316407, BG261268, BF184232, |
| | | | | | BF115962, AW965314, AW005623, AW973905, BG171109, |
| | | | | | BE736594, BF529773, AI928466, |
| | | | | | AW516590, BF966979, BE046448, AW014546, BE876855, |
| | | | | | BG254307, AW958252, W87297, |
| | | | | | BF526617, AW959008, AA164613, BF439848, AW000936, |
| | | | | | AI703274, N24392, AI580919, AA037159, |
| | | | | | AI686912, AA179191, AW594515, AW085214, BE671804, |
| | | | | | AI168495, BE296633, AA868707, |
| | | | | | AA225014, AA888872, AI219983, AA179201, AI660755, |
| | | | | | AA164612, AI334991, AA420527, H97664, |
| | | | | | AW510978, AA988373, R70657, AA576605, AA437178, |
| | | | | | AA628293, H10567, N36611, BF966853, |
| | | | | | AA970653, AI806255, AA224953, BE296638, W39077, |
| | | | | | AW242291, AA594662, H99143, AW078769, |
| | | | | | AI679580, AI269095, N94194, AI680017, AA844022, |
| | | | | | H23755, BF966096, AA602349, BE164717, |
| | | | | | N99359, BE328493, W87353, R46707, AA889625, |
| | | | | | AA573514, R77834, BE090735, N25981, R51410, |
| | | | | | BF247470, R25551, AA398028, H80504, H48364, |
| | | | | | AA470783, AW207718, H06507, R64682, BE904435, |
| | | | | | AA426463, R12724, H06563, R64681, N63835, |
| | | | | | BF377563, R39776, R16671, BF966194, AA332170, |
| | | | | | AA378783, BF353343, AA609145, AA887867, H60238, |
| | | | | | H48275, AA360706, AI208801, BF884388, |
| | | | | | H11082, BF361356, AW238918, AI886136, R51298, |
| | | | | | R20363, N89819, H81420, N48366, AL527159, |
| | | | | | AV691174, BF361358, R40704, AW795836, AA704248, |
| | | | | | BF884528, T03502, C01112, BG055466, |
| | | | | | R41078, AA927831, AA988831, R75935, R31994, |
| | | | | | AA420594, R43748, AA356016, AA350100, |
| | | | | | AA639019, R16672, C14942, BF963256, AW947442, |
| | | | | | N71425, H60193, BE694187, BE694204, |
| | | | | | AA376032, BF358985, AI475079, R13270, AI872772, |
| | | | | | AW627454, BE841315, N55971, BF348486, |
| | | | | | AA938370, BE906485, N49143, BF370548, BE841319, |
| | | | | | AA169181, AA169309, BF204852, BE881724, |
| | | | | | AW051264, BE937060. |
| HLWBY76 | 140 | 797609 | 1-2067 | 15-2081 | AA923172, AI139607, AI269739, AI802946, N30680, |
| | | | | | AI277957, AI277237, BE715040, BE838082, |
| | | | | | BF354274, AW797336, AW797335, BF987948, AW873630, |
| | | | | | AI806044, AK026806.1, AC003991.1, |
| | | | | | AK027807.1. |
| HLWCF05 | 141 | 460619 | 1-632 | 15-646 | AW673972, AA524980, AI961840, AW515257, AA877458, |
| | | | | | AI336752, AW070880, N66443, AA528268, |
| | | | | | AI273991, N26777, AA004802, BF990906, AA700372, |
| | | | | | AI290414, AA906772, AI243008, H17960, |
| | | | | | AA502507, AA860313, AW470183, H84037, BF348530, |
| | | | | | R54094, BF764578, H84462, R30859, |
| | | | | | BF764695, AI864306, AW022917, AW970612, D45536, |
| | | | | | AI908718, BF878700, AW999226, |
| | | | | | BC003414.1, AL450487.17, AK025020.1. |
| HLYAC95 | 142 | 778075 | 1-298 | 15-312 | AV764526. |
| HLYAP91 | 144 | 553514 | 1-1262 | 15-1276 | AA464480, AI738416, AW970172, BF346852, BE004609, |
| | | | | | AI097351, AI051171, AW085704, N50904, |
| | | | | | AI950137, AI718945, H64092, BG236491, AI964070, |
| | | | | | AA514204, AW401489, W76242, H64144, |
| | | | | | AW204133, AA295625, AW388106, BF751672, AA693868. |
| HLYES38 | 145 | 63804 | 1-1209 | 15-1223 | AV701925, BE883545, BE250577, BE736918, BE616582, |
| | | | | | BF793477, AV706319, BF338817, BF346135, |
| | | | | | BE728115, BE615376, BG250960, BG032917, AU139668, |
| | | | | | BF951636, BF811794, BE899007, |
| | | | | | BE898175, BF217767, AL133895, AA225638, AU121535, |
| | | | | | BE531051, AU135520, AW899342, |
| | | | | | AA601152, BF675027, AA601227, BE154390, BF911201, |
| | | | | | BE385152, BF680445, BE264980, BE386373, |
| | | | | | AA715194, BF874267, BF871285, AA826146, AW023095, |
| | | | | | AW957880, AW957801, AW962273, |
| | | | | | AV732690, AA307661, BF882363, AW845664, AV749263, |
| | | | | | BF197329, AA779025, AA489803, |
| | | | | | AW872342, BF815608, AV748578, BF957961, AI380547, |
| | | | | | AA833581, AA243106, AW939910, |
| | | | | | BE304382, BF877837, BE141836, AV750972, AW962826, |
| | | | | | BF982391, AW938878, AU116940, |
| | | | | | BF203663, AA503299, AV652861, H02956, T57668, |
| | | | | | T47541, BF763870, AW865469, AV731015, |
| | | | | | BF207674, AI940701, BE184422, AA280232, BE792178, |
| | | | | | BF829537, BF767788, BF957954, AV683302, |
| | | | | | AV698434, AA258511, AI918674, AA121877, T07838, |
| | | | | | AA804919, AW515786, AA281292, AW865403, |
| | | | | | AU140348, BF238662, AA353112, BF732306, BF940980, |
| | | | | | T84195, AA431655, T06482, AI440300, |
| | | | | | H67786, AV715734, BE565499, AA630813, BF673583, |
| | | | | | AI761174, BF812273, AA593381, N62150, |
| | | | | | AA487808, W22010, AW898213, AW963317, AV653743, |
| | | | | | H67930, AI940708, AW864780, AA359714, |
| | | | | | AI052560, T07383, AW899527, AW999271, AW845678, |
| | | | | | AA649067, AW898920, AA356190, T97032, |
| | | | | | AA434462, AA221018, R01106, AA418919, AA431294, |
| | | | | | BF873657, AW630075, H73439, AA583363, |
| | | | | | T81895, T47477, BE177666, BE083070, BF951580, |
| | | | | | AW845665, AV729748, AA720812, AA577789, |
| | | | | | AA173218, BE968449, BF096068, BF869076, AW893125, |
| | | | | | H47099, AV730261, AW409222, |
| | | | | | AC005166.1, AL133514.7, AC005588.1, AL355143.17, AC004045.1, |
| | | | | | AL450333.13, |
| | | | | | AC008962.8, AC005768.17, AP002853.3, AC009466.17, AP000880.4, |
| | | | | | AL157688.4, |
| | | | | | AL121939.12, AC010369.6, AC004946.1, AL139327.18, AC011198.2, |
| | | | | | AL135780.11, |
| | | | | | AK022205.1, AC069304.7, AL109769.4, AL049781.5, AP001669.1, |
| | | | | | AL355520.8, AL133517.11, |
| | | | | | AC026398.4, AL353133.7, AL357153.4, AL049796.28, AF002997.2, |
| | | | | | AL356498.10, |
| | | | | | AL360020.15, AL121958.6, AP000826.4, AL590964.8, AL022399.2, |
| | | | | | AL121949.13, AC007065.5, |
| | | | | | AC023154.5, AL008722.16, Z82212.1, AL138965.10, AP001179.4, |
| | | | | | AL360272.23, AC006379.2, |
| | | | | | AC034215.4, AC020549.4, AL359973.11, AL357272.10, AL117191.6, |
| | | | | | AC012499.7, AL163052.4, |
| | | | | | AC010478.5, AC008488.7, AC004664.1, Z82203.1, AC012492.9, |
| | | | | | AL353573.10, AC023866.7, |
| | | | | | AC018659.35, AC007392.3, AL390035.10, AL353811. AL121980.14, |
| | | | | | AP001880.4, |
| | | | | | AP000629.4, AL357892.13, AL022401.1, AL137191.5, AC003013.1, |
| | | | | | AL136101.7, AC006399.6, |
| | | | | | AL355807.11, AL391475.7, AC003953.1, AC026773.4, AC026409.3, |
| | | | | | AC010289.7, AC002349.1, |
| | | | | | AL035422.12, AC011359.5, AC018705.10, AL050401.5, AC007250.2, |
| | | | | | AL022101.1, AL358337.1, |
| | | | | | AL353788.33, AL008713.1, AC006395.1, AC090645.1, AL358335.4, |
| | | | | | AL008633.1, AC020977.5, |
| | | | | | AL121947.14, AC016591.6, AC090497.2, AC083862.2, AL136110.17, |
| | | | | | AC010969.11, |
| | | | | | AC006313.1, AL035397.4, AL160236.4, AL389888.8, AL590675.3, |
| | | | | | AC013242.7, AC024610.6, |
| | | | | | AC010749.3, AC009404.5, AC007248.3, AC009901.6, AL365179.30, |
| | | | | | AL158033.18, |
| | | | | | AL031671.12, AC006061.1, AC007032.2, AC067744.5, AP001972.4, |
| | | | | | Z78022.1, AL121694.4, |
| | | | | | AB017651.1, AL109662.3, AL035427.17, AL109845.8, AL079333.7, |
| | | | | | AL133348.8, AC010209.13, |
| | | | | | AL359914.14, AL049821.6, AL139396.17, AC019097.5, AL117327.5, |
| | | | | | AC022413.4, AC004006.1, |
| | | | | | AL162587.20, AL356789.16, AL022097.1, AC073325.8, AF003529.1, |
| | | | | | U82696.1, AC007489.3, |
| | | | | | AC009039.6, AL163281.2, AC069543.4, AF274856.2, AL359012.7, |
| | | | | | AP001573.3, AC025471.5, |
| | | | | | Z70233.1, AC004979.1, AC023347.8, AC021133.5, AL590363.6, |
| | | | | | AL133386.3, AL160471.5, |
| | | | | | AC020987.8, Z95325.2, AC069298.8, AL157791.4, AC004535.1, |
| | | | | | AL355540.12, AC009122.8, |
| | | | | | AC012450.9, AC026445.4, AC008860.6, AC016612.5, AL080316.8, |
| | | | | | AC002407.1, AC011745.4, |
| | | | | | AC007376.9, AC005029.1, AK022413.1, AC090004.1, AC069462.2, |
| | | | | | Z85997.1, AL590043.7, |
| | | | | | AF128525.2, AC007256.5, AC025040.7, AL078600.15, AL500522.9, |
| | | | | | AF064865.1, AF235098.1, |
| | | | | | AC002086.1, AC079316.15, AC034305.6, AC020896.5, AC008886.5, |
| | | | | | AC008834.6, AP002088.2, |
| | | | | | AL159970.16, AL157911.4, AC002458.1, AL590034.10, AC073387.4, |
| | | | | | AC007743.3, |
| | | | | | AC005510.3, AC005016.1, AC078848.3, AC022710.10, AC022073.13, |
| | | | | | AL356956.11, |
| | | | | | AL160052.21, AL137013.4, AC004050.1, AC005272.1, AC005826.1, |
| | | | | | AL158147.17, |
| | | | | | AC008173.2, AL034399.6, AL158823.11, Z99570.1, AL121577.1, |
| | | | | | AC021237.5, AC021001.5, |
| | | | | | AL138920.11, AC069294.5, AF280107.1, AF117829.1, AL109921.21, |
| | | | | | AP000457.3, AL033375.2, |
| | | | | | AC008071.2, Z71187.1, AP002076.3, AL139106.12, AC004083.1, |
| | | | | | AL357312.8, AL162571.9, |
| | | | | | AL162373.16, AL133339.13, AL161450.14, AC005187.1, AL356473.11, |
| | | | | | AL353691.12, |
| | | | | | AC007000.2, AC018741.3, AC013429.12, AC008265.15, AC044791.6, |
| | | | | | AC068712.6, |
| | | | | | AC016617.5, AC004845.2, AC012152.12, AL445669.9, AL163248.2, |
| | | | | | AF207955.1, AC004668.1, |
| | | | | | AF109076.1, AC013562.6, AL139231.13. |
| HMADK33 | 146 | 561941 | 1-850 | 15-864 | AL538273, AW139111, AA663592, AI582741, AL120259, |
| | | | | | H51572, AI122619, AI124509, BF366373, |
| | | | | | R86660, H50906, R86835, BF836623, BE884648, |
| | | | | | AF070673.1, AF030196.1, AL161976.1, |
| | | | | | BC005837.1. |
| HMADS41 | 147 | 596831 | 1-1253 | 15-1267 | BE740695, BE739906, BE899124, BE742745, BF685920, |
| | | | | | BF971897, BF684948, BE336652, BE747520, |
| | | | | | BE925550, AI733012, AI492192, BE207602, AW275042, |
| | | | | | AA954656, AW139807, AI791409, |
| | | | | | AW136444, AI361524, BE207644, AI762361, AI762373, |
| | | | | | AI246377, BF684146, AA306161, BF062047, |
| | | | | | BF222947, AW003832, BG028044, AA865078, AA402599, |
| | | | | | N32269, BC007725.1, AF123757.1, |
| | | | | | AF123758.1, AF123759.1, AF123760.1, AF123761.1. |
| HMAMI15 | 148 | 1352406 | 1-1244 | 15-1258 | BE790239, AI114496, BE047613, AI609021, AI478544, |
| | | | | | AI949665, R96283, AI205799, W39248, |
| | | | | | AI670908, T70976, AA070919, AI243978, AW854183, |
| | | | | | AI796472, BF883407, AW975683, AA654405, |
| | | | | | AI125888, AA730911, AA545731, BE222003, AA730927, |
| | | | | | C21177, AA721678, AI478489, |
| | | | | | AL137139.9, AL139035.27. |
| HMCFY13 | 149 | 635301 | 1-869 | 15-883 | BF026299, BE277091, AI343297, BF027218, BE390121, |
| | | | | | BE387283, AL514638, BE388858, AI364111, |
| | | | | | BE389119, AI668959, BE391988, AW206551, AA676232, |
| | | | | | BE870993, BF002101, BE277034, |
| | | | | | BE729557, BE276352, BF125430, BF896609, BE386944, |
| | | | | | AW207225, AA551687, BE718320, |
| | | | | | BF131318, AI990714, BE693868. |
| HMDAB56 | 150 | 560676 | 1-1451 | 15-1465 | AI075053, AW972336, AI199257, AA493693, N80663, |
| | | | | | AW879550, AL138455, AA633753, AA640410, |
| | | | | | AA640430, AW815064, BF820510, AA018283, AL037554, |
| | | | | | BG033220, BF822854, AV759329, |
| | | | | | BG033926, AL120343, BE062169, BF679557, AV757425, |
| | | | | | AI631355, AW129526, AV710289, |
| | | | | | BF868399, AW063373, BF437493, AW936354, AI094787, |
| | | | | | AW500029, BF915002, AA908411, |
| | | | | | AV760207, AV761925, AW975971, BF666395, BE858219, |
| | | | | | AV764035, AU137841, BF679274, |
| | | | | | BG002515, BF698704, BE064275, AA493136, AI700109, |
| | | | | | BE883107, BF699964, AI918465, AA507547, |
| | | | | | AI805123, AP002088.2, AC008014.5, AC009470.4, AC011450.4, |
| | | | | | AL133480.9, AL356244.12, |
| | | | | | AP000493.1, AC008521.5, AL353741.16, AC004638.1, AL139148.11, |
| | | | | | AC011475.6, |
| | | | | | AL158832.13, AC004634.1, AC005102.1, AL135749.3, AC010105.12, |
| | | | | | AC000088.2, |
| | | | | | AC019197.7, AL133214.12, AP000901.5, AC008891.7, AC021188.6, |
| | | | | | AL049776.3, AL117355.5, |
| | | | | | AC002128.1, AL450483.1, AC007774.1, AL080315.18, AC008622.5, |
| | | | | | AL135901.23, AP001692.1, |
| | | | | | Z84485.1, AC007097.4, Z84480.1, AC022415.5, AC008747.5, |
| | | | | | AC000082.4, AC020908.6, |
| | | | | | AF121897.2, Z98747.1, AC010422.7, Z84720.1, AL109921.21, |
| | | | | | AC090944.1, AC074338.1, |
| | | | | | AC007318.4, AL136219.17, AC004841.2, AC003109.1, U82668.1, |
| | | | | | AC003103.1, AC020977.5, |
| | | | | | AF057280.1, L44140.1, AC004774.1, AC011242.8, AC020913.6, |
| | | | | | AL354935.23, AC069080.12, |
| | | | | | AL389888.8, AC007036.3, AL136359.13, AC005746.1, AC006441.13, |
| | | | | | AL133453.3, |
| | | | | | AC084732.1, AL353194.13, AC004466.1, AC004253.1, AC025165.27, |
| | | | | | AL160175.5, |
| | | | | | AC005840.2, AP000251.1, AC007225.2, AL161779.32, AL033378.12, |
| | | | | | AL359397.3, AL022725.8, |
| | | | | | AL159977.10, AP001412.2, AF196779.1, AC025765.5, AC007388.3, |
| | | | | | AC016697.8, AC006023.2, |
| | | | | | AF334404.1, U52111.2, AC008896.5, AL121655.1, AP003117.2, |
| | | | | | AC009320.7, AC004087.1, |
| | | | | | AL121992.24, AL136304.10, AL138759.20, AL031228.1, AC006211.1, |
| | | | | | AL121752.13, |
| | | | | | AL157406.19, AC025418.23, AC007012.1, AC006548.20, AL354670.4. |
| HMEED18 | 151 | 560775 | 1-1355 | 15-1369 | BF967947, BF794640, BE744676, BE872383, BE261972, |
| | | | | | BF680443, BF967220, BE732377, AI417193, |
| | | | | | W95515, AW294641, BF306808, AI189166, BE856708, |
| | | | | | BE644954, AI949989, BF530795, AA628537, |
| | | | | | BE551422, BE747031, BE304795, BE735201, AI457735, |
| | | | | | BE870962, AI634510, BF131863, AI671536, |
| | | | | | BF242851, AI870629, AW514766, AI813311, AI862663, |
| | | | | | BE293244, AI768533, AI823596, AA129467, |
| | | | | | AI446582, AI435116, AI627345, AA972422, AI968606, |
| | | | | | AI088367, AI827354, BF439637, AI824877, |
| | | | | | BE220123, AV703921, AW236583, AI377591, AI040592, |
| | | | | | AA648774, AI095815, AW953613, D59730, |
| | | | | | D59523, AA029160, AW009152, AA054405, AI244209, |
| | | | | | AW023899, BE674038, BF059180, D59622, |
| | | | | | AA778356, AI470145, BF378975, AA970493, AI368877, |
| | | | | | D59801, AA129466, AI659586, AI344665, |
| | | | | | AI824866, AI803930, D59455, AA993837, D59633, |
| | | | | | R61441, AA704531, AW022576, AA484947, |
| | | | | | BF955158, D59447, AV725111, BE870487, AI082578, |
| | | | | | R35366, T74319, BF948389, D59583, D59781, |
| | | | | | R35909, AI365131, D59454, AW341984, BE467192, |
| | | | | | AI864239, D59649, D59777, H09254, T89104, |
| | | | | | AI128531, H23419, D59584, H09679, R23394, |
| | | | | | T77005, D59540, F13041, F10282, D80153, D80213, |
| | | | | | F10633, D59650, AA333625, BF855208, D59537, |
| | | | | | D59800, D59536, AI867775, AI702258, D80146, |
| | | | | | D59825, D59539, R25274, AA301260, D59438, |
| | | | | | H23420, D80341, D59769, D80323, AA827217, |
| | | | | | D59439, D59794, D59473, AA319561, R38088, |
| | | | | | R44178, R20566, D59692, F16283, D80260, R61396, |
| | | | | | D59749, AV726311, AA095729, D59772, AI088314, |
| | | | | | BF967226, AI383053, D59813, H22900, R14241, |
| | | | | | D59752, R40536, T34343, BF510049, F13475, |
| | | | | | D59782, AA346675, D80245, AI434889, Z43638, |
| | | | | | D59459, AW303981, D80381, BG054921, AW291373, |
| | | | | | D59812, AI418992, BF948033, AW516233, |
| | | | | | AI434666, BF837006, AW816352, AI356833, BF771676, |
| | | | | | AW340432, AA331587, AA332355, |
| | | | | | BF156021, AF353992.1, AK026257.1, BC008873.1, BC006150.1, |
| | | | | | AL512689.1. |
| HMEFT54 | 152 | 520307 | 1-582 | 15-596 | AI925461, AI187417, AA527170, W51933, AA534506, |
| | | | | | AI699870, AA430389, AW264729, AA284284, |
| | | | | | D20078, AI350867, AW131222, W48637, AA400891, |
| | | | | | AI458334, AI168826, AA400960, BF590627, |
| | | | | | AV719049, AV699669, AI557751, AW962245, AW975618, |
| | | | | | AA365173, Z21582, C14298, C14331, |
| | | | | | C15076, AV699550, AV724520, AW973541, AV718692, |
| | | | | | AW950117, D80064, AV719758, AV718489, |
| | | | | | AW949498, D59787, D59467, AA526218, AA701131, |
| | | | | | F13647, AW817409, AA434346, D80164, |
| | | | | | AV729929, AW964468, AI201668, D59889, D80195, |
| | | | | | AA507526, AV720791, AV718530, AI694178, |
| | | | | | D81030, BF382730, AV720203, AW960553, D50995, |
| | | | | | AV700889, BE148028, AU119190, R20046, |
| | | | | | BE001177, AW949645, D80196, BE748599, D51423, |
| | | | | | T41134, BF837744, AV718800, BF876179, |
| | | | | | D80212, C14227, BC002933.1, AK026989.1, AF254260.1, |
| | | | | | AL136917.1, BC008301.1, |
| | | | | | AF086205.1, AF254860.1, AC090939.1, AC005230.1, AF037338.1, |
| | | | | | AC004823.1, AC004922.2, |
| | | | | | AC020716.3, Z95116.1, AC025166.7, AL445184.11, AC009131.6, |
| | | | | | AC006581.16, AC010530.7, |
| | | | | | AP000172.1, AC003101.1, AP000057.1, AC005038.5, AP000125.1, |
| | | | | | BC005232.1, AC002407.1, |
| | | | | | AL031985.10, AC007308.13, AC002492.1, AC007021.3, AC012476.8, |
| | | | | | AP000688.1, Z98884.11, |
| | | | | | AC006241.1, AL355312.24, AL354932.26, AC004526.1, AC007387.3, |
| | | | | | AF283320.1, AC008543.7, |
| | | | | | AC034193.4, Z83851.17, AC005529.7, AC007193.1, AC018828.3, |
| | | | | | AC022383.3, AL158159.14, |
| | | | | | AC018808.4, AP001721.1, AC083873.3, AC004476.1, AL136365.9, |
| | | | | | AL096791.12, AC008009.4, |
| | | | | | AC005670.1, AC008524.6, AL031673.19, AL139317.5, AC005531.1, |
| | | | | | AC008397.7, AF215937.1, |
| | | | | | AC011811.42, U80017.1, AC006071.1, AL158828.14, AC008969.5, |
| | | | | | AL590002.7, U53331.1, |
| | | | | | AL354685.17, AL157877.11, AL442203.12, AL096701.14, AL160269.14, |
| | | | | | AC006312.8, |
| | | | | | AL512600.5, AP000030.1, AL445237.16, AC010271.6, AC010326.6, |
| | | | | | AC006571.12, AL034379.8, |
| | | | | | AC004685.1, AL023807.6, AC022415.5, AL121747.41, AL161669.5, |
| | | | | | AC000025.2, AL121886.22, |
| | | | | | AC018663.3, AC020983.7, AC010183.6, AC073366.3, AL359402.3, |
| | | | | | AC005015.2, AC005527.3, |
| | | | | | AC005823.1, AC026464.6, AL138878.10, AC005585.1, AC006480.3, |
| | | | | | AC010422.7, AC004832.3, |
| | | | | | AC004973.1, AC005039.1, AC004825.2. |
| HMEGF92 | 153 | 520304 | 1-615 | 15-629 | T65556, BF952979, F09666, AA995112, AA983746, |
| | | | | | AA983748, AP001972.4. |
| HMSDL37 | 154 | 973996 | 1-2483 | 15-2497 | BF358189, BF358186, BF358188, BF673854, AV762975, |
| | | | | | AA481760, AL042906, BE908602, |
| | | | | | AU154050, AU158859, AI310464, AA113159, AV718718, |
| | | | | | AW080062, AI952885, AL042905, |
| | | | | | BG029899, AA679794, BF813805, BE206133, AL048969, |
| | | | | | AI132963, AW401509, AV700988, |
| | | | | | AA113272, N49425, BF968610, AW975169, AA524604, |
| | | | | | AW157616, BE300645, AW008089, |
| | | | | | AV699423, AW976010, AV700654, BF679169, AI016704, |
| | | | | | N80210, AW151713, AU117926, AA427470, |
| | | | | | AW957502, AV760701, AI631119, N48230, BE895796, |
| | | | | | AW962035, AW979158, BF673743, AL534685, |
| | | | | | AA833875, AA833896, BF926318, BE061906, AA081138, |
| | | | | | AL044339, AW268329, AW960015, |
| | | | | | BG254652, AW600804, AU140392, BF820678, BF668559, |
| | | | | | AV764259, AA572968, BF736198, |
| | | | | | AV734543, BG222875, AW897556, BF892846, AC022001.3, |
| | | | | | AC018811.4, AC018494.6, |
| | | | | | AL353810.9, AC005553.1, AL139396.17, AL020995.14, AL163151.1, |
| | | | | | AL021918.1, AC022534.7, |
| | | | | | AL135903.12, AL161443.13, AC007912.6, AC018684.3, AC019052.7, |
| | | | | | AL163248.2, AJ400877.1, |
| | | | | | AC006313.1, AC022401.3, AC025165.27, AF274857.1, AL445186.4, |
| | | | | | AL137782.9, AL139322.13, |
| | | | | | AL355520.8, AC003065.1, AC004813.2, AE000659.1, AL139109.14, |
| | | | | | AC027670.4, AC021396.6, |
| | | | | | AC005033.1, AC007251.3, AC015723.8, AL392106.4, AC004073.1, |
| | | | | | AC007963.7, AC006544.19, |
| | | | | | AL353788.33, AL133500.3, AL512641.9, AC010376.5, AC073964.3, |
| | | | | | AC004650.1, AL157955.5, |
| | | | | | AL358372.11, AL359077.10, AL137918.4, AL035608.11, AL138783.6, |
| | | | | | AL135924.11, |
| | | | | | AP001189.4, AP002453.3, AL133373.5, AL391122.9, AL023876.2, |
| | | | | | AL163209.2, AC021093.16, |
| | | | | | AP001719.1, AC068643.27, AL121755.23, AC007068.17, AL359332.2, |
| | | | | | AL133241.3, |
| | | | | | AC007611.5, AL357060.31, AC078841.4, AL138880.14, AL159140.4, |
| | | | | | AL513264.8, |
| | | | | | AL138920.11, AC004021.1, Z92547.1, AC068102.4, AC089987.26, |
| | | | | | AC009289.8, AL163280.2, |
| | | | | | AC010282.5, AL157827.17, AJ006997.1, AC005066.1, AL163303.2, |
| | | | | | AC009122.8, AL035090.10, |
| | | | | | AL359205.15, AL133417.10, AC090497.2, AC007097.4, AC005280.3, |
| | | | | | AL359400.4, |
| | | | | | AC010591.8, AL354868.10, AP001718.1, AF131216.1, AC068312.4, |
| | | | | | AL109865.36, Z84480.1, |
| | | | | | AC009404.5, AC006543.7, AC007510.6, AL160162.11, AL354942.10, |
| | | | | | AC005862.1, |
| | | | | | AL136090.12, AC084882.2, AL353812.13, AC022740.4, AC008863.7, |
| | | | | | AC018797.4, |
| | | | | | AC006348.3, AL359644.10, AC008701.5, AC087427.2, AC074391.5, |
| | | | | | AL035407.15, |
| | | | | | AC010292.7, AL512310.3, AC020717.3, AC010885.8, AF235098.1, |
| | | | | | AL161629.10, AL035468.3, |
| | | | | | AC007447.6, AC007455.7, AC007385.3, AL390121.6, AC021351.4, |
| | | | | | AC009499.4, AC021849.5, |
| | | | | | AC010904.10, AL034410.8, AC010726.4, AC011701.22, AP001713.1, |
| | | | | | AL160281.17, |
| | | | | | AL357150.7, AL109854.10, AL035661.16, AL355530.6, AL138479.4, |
| | | | | | AC073125.5, Z95126.1, |
| | | | | | AC068139.5, AL390731.9, AP002006.5, AL161938.6, AC073150.7, |
| | | | | | AL117345.21, AC066593.4, |
| | | | | | AL391868.15, AC068993.14, AC010585.6, AF279660.2, AL161892.9, |
| | | | | | AL121895.26, |
| | | | | | AL022241.2, AL035697.19, AC002403.1, AC026882.5, AL021940.1, |
| | | | | | AL445495.5, AL049875.2, |
| | | | | | AC018653.29, Z93015.9, AL117693.5, AC010638.7, AP001981.5, |
| | | | | | AL390838.26, AC008962.8, |
| | | | | | AC004852.2, AP000751.4, AC020941.5, AL160397.17, AL158167.15, |
| | | | | | AF188030.3, |
| | | | | | AL121932.19, AL590239.7, AL356379.10, AL390039.10, AF205588.1, |
| | | | | | AC007938.1, |
| | | | | | AL031294.1, AP003438.2, AL050308.9, AF002223.1, AC006028.3, |
| | | | | | AC011246.6, AL137129.4, |
| | | | | | AL162455.14, AC080094.5, AC005183.2, AJ006345.1, AF106564.1, |
| | | | | | AC007739.2, AC010127.12, |
| | | | | | AL392044.7, AP000577.4, AL132987.4, AL135841.11, AL031286.1, |
| | | | | | AC066611.6, AC073532.18, |
| | | | | | AB026898.1, AF003627.2, AL162430.15, AL512359.2, AP001720.1, |
| | | | | | AL136520.3, AC073917.19, |
| | | | | | AC024367.6, AF224669.1, AL161804.4, AP003477.2, AL359763.9, |
| | | | | | AC025263.22, AL163301.2, |
| | | | | | AC004933.1, AL356108.12, AL359693.11, AC022407.6, AC022468.5, |
| | | | | | AL121900.26, Z82206.1, |
| | | | | | AC011497.6, AC034305.6, AL035671.5, AC008280.4, AL117337.25, |
| | | | | | AL022163.1, AP001731.1, |
| | | | | | AL158147.17, AL354750.12, AL359292.12, AC007717.8, AL132774.20, |
| | | | | | AL050305.9, |
| | | | | | AL118557.5, AL356421.10, AC019233.7, AL355615.12, AL034384.1, |
| | | | | | AC010422.7, AC013242.7, |
| | | | | | AL356125.13, AC005058.1, AC006288.1, AL161908.13, AC009479.4, |
| | | | | | AL360231.16. |
| HMSFI26 | 155 | 560229 | 1-1203 | 15-1217 | BF902399, W89152, BE391139, AW975663, AA767864, |
| | | | | | AW020255, AW021440, AI024622, |
| | | | | | AA730474, AA551532, AC069548.4, AC004906.3, AC004675.1, |
| | | | | | AC006965.3, AF088219.1, |
| | | | | | AL121574.19, AL139109.14, AC004813.2, AL162231.20, AC013734.4, |
| | | | | | AC012459.7, |
| | | | | | AL157955.5, AL391827.18, AC022407.6, AL034422.24, AC004216.1, |
| | | | | | AC011551.3, |
| | | | | | AL355336.15, Z83822.1, AC010252.3, AC008720.6, AL391122.9, |
| | | | | | AC000353.27, AC012377.5, |
| | | | | | AC011816.17, AC004408.1, AC007363.3, AC073101.7, AC010092.4, |
| | | | | | AC016396.5, AL117355.5, |
| | | | | | AC022201.4, AF235098.1, AL157372.18, AC007228.1, AL445237.16, |
| | | | | | AC008066.4, AL591770.1, |
| | | | | | AL162831.5, AP000355.1, AC026770.6, AL353588.25, AC006461.2, |
| | | | | | AC005840.2, AC005912.1, |
| | | | | | AC011456.2, AC009137.6, AL035079.14, AB042297.1, AL365400.19, |
| | | | | | AC003950.1, |
| | | | | | AC027126.4, Z98884.11, AL034369.1, AL031670.6, AC090955.2, |
| | | | | | AL157893.16, AC004685.1, |
| | | | | | AL133500.3, AC011497.6, AC018500.3, AL158206.8, AC019171.4, |
| | | | | | AC025168.7, AL034346.31, |
| | | | | | AC005736.1, AL133279.7, AL391724.7, AC002565.1, AP000284.1, |
| | | | | | AL080315.18, AL133410.31. |
| HMSJU68 | 156 | 427121 | 1-1109 | 15-1123 | AV742802, AV736824, AV762141, AV753828, AV762045, |
| | | | | | BF916188, AV760835, BG222151, |
| | | | | | BG223218, BF061262, BF941567, AA828594, AW516505, |
| | | | | | BE676909, AA577958, BF060915, |
| | | | | | BG222210, AW873282, AW275790, AW276788, BE094185, |
| | | | | | AA558345, AA654640, AV743295, |
| | | | | | AA558510, BE676942, AA557706, AA557822, AW207035, |
| | | | | | BG223416, AW265566, AA559325, |
| | | | | | AW238403, AA558026, AV739745, AV760038, BG223515, |
| | | | | | AA578392, BG222140, AA558224, |
| | | | | | BF478305, AA578270, AA559188, BF958015, AW262059, |
| | | | | | BF478270, AA557769, AW270791, |
| | | | | | AA559277, AA569545, BG223580, BE085317, BG059176, |
| | | | | | AA559172, AW858170, AA507151, |
| | | | | | BG232125, AA627329, AV740217, AV701975, AA559340, |
| | | | | | BF941579, AA558286, AA548031, |
| | | | | | AA570788, AA502836, BG232137, BG230527, BG222163, |
| | | | | | AA577934, AA557810, AA595852, |
| | | | | | AA559288, BE085236, AA558019, BF885059, AA559233, |
| | | | | | AW963105, AA558045, AA578106, |
| | | | | | AI742874, AW593405, AW858152, AI825755, BG222255, |
| | | | | | BE503281, AA557725, AA502815, |
| | | | | | AI123361, AA559881, AI972281, AI350499, AI654949, |
| | | | | | BE672982, AA343913, BF478285, BG231208, |
| | | | | | BF475685, T57040, BF992614, AA558319, BG154204, |
| | | | | | AA558147, AA578489, BE073960, BF798988, |
| | | | | | AA578006, AA506533, BF001678, AW803144, AA558054, |
| | | | | | BE073961, AA559226, BG222123, |
| | | | | | BF592287, AA559152, AA558819, AA244130, BG222234, |
| | | | | | W20451, AW265531, H55799, BG222065, |
| | | | | | AA229363, BG230470, BF798970, AA559939, AA618488, |
| | | | | | AA635453, AW974805, AA650082, |
| | | | | | X04992.1, AF052051.1, AL160155.19, X04236.1, AL162581.11, |
| | | | | | AL137230.3, X05490.1, |
| | | | | | AC025770.5, X04235.1, AC007397.21, AC006334.3, AC007535.3, |
| | | | | | AF312913.1, AC011243.8, |
| | | | | | AC008114.25, AL391097.13, AC007957.36, AC008716.6, AP000556.2, |
| | | | | | AP000552.1, |
| | | | | | AC023490.5, AC073838.6, AL354766.17, AC015798.7, AL583828.4, |
| | | | | | AL132765.38, |
| | | | | | AC010305.3, AP000233.1, AP000147.1, AP001692.1, AC010374.5, |
| | | | | | AC010418.6, Z93241.11, |
| | | | | | AC018765.4, AC023468.6, AC005684.1, AL133519.28, AC005064.3, |
| | | | | | AL049710.18, |
| | | | | | AL033392.5, AL121752.13, AL117374.39, AC078889.20, AC006000.2, |
| | | | | | AC002301.1, |
| | | | | | AC010219.4, AL160237.4, AC008417.3, AC012603.6, AC007383.4, |
| | | | | | AC016732.7, AC087432.2, |
| | | | | | AC087427.2, Z98949.1, AL591398.2, AL359542.13. |
| HMTBI36 | 157 | 1301451 | 1-3374 | 15-3388 | BG256587, BE548463, AL134548, BE867461, BE409149, |
| | | | | | AW854259, AW854064, AI968217, |
| | | | | | AI651409, BF828833, BG258304, AL134549, BF825872, |
| | | | | | AI760574, AW502392, BF769439, AI146791, |
| | | | | | BF828754, AW503066, AI917343, BF846301, AL135082, |
| | | | | | AW001418, AI964094, AA845693, |
| | | | | | AW406355, AI203511, AA527307, AA232749, AW014101, |
| | | | | | AI972765, AI963870, BF892538, AI911155, |
| | | | | | AW854215, AI573189, AI970351, AI951888, AW854211, |
| | | | | | BF590826, BF868515, AI432373, AW854189, |
| | | | | | AI671531, AA741075, AA527993, BF931296, AI147562, |
| | | | | | AI650589, AA535004, AA809634, AI523816, |
| | | | | | AI372088, BE504805, AI654213, BG117158, R73344, |
| | | | | | W16731, AI810884, AI376373, AI867208, |
| | | | | | AI684987, AI952939, AA504770, AI439038, BF904642, |
| | | | | | AA927544, AW505179, AI336803, AI631696, |
| | | | | | AI420438, AI288066, AW501928, BF826497, AW504864, |
| | | | | | AW013985, BF760209, BF894715, |
| | | | | | AA829400, AW500832, AA653458, AI582571, AI867525, |
| | | | | | AI637622, AA483816, AA491154, |
| | | | | | AA836167, AV650735, AI587126, AI873559, BE219008, |
| | | | | | AA505113, BE734806, AI651931, AI638281, |
| | | | | | AI760522, AI400323, BE840233, BE840224, AL134637, |
| | | | | | AI783674, AI825752, H26511, AA825621, |
| | | | | | AA926792, BE840052, BF899615, AI742276, BE505014, |
| | | | | | AW881791, AA505879, AI673191, BF064023, |
| | | | | | AW087760, BE074795, AI380678, AI341372, AA491313, |
| | | | | | AI339197, AI971063, AI673213, AI627934, |
| | | | | | BE825164, AI653411, AA421004, BE763396, N90130, |
| | | | | | AI366056, W68390, BE763404, AI382284, |
| | | | | | AW779768, BF955986, AI653256, AW137621, AI921836, |
| | | | | | AA489461, AA595019, AI867819, |
| | | | | | AA036799, AW080786, AI640862, AW843282, AI825291, |
| | | | | | AI741634, AI741624, AI583597, AI401569, |
| | | | | | AW082567, AA243210, AI695600, AW204751, BF898711, |
| | | | | | AI700098, AI383831, AI887999, AI783742, |
| | | | | | AA830462, AW190430, AA649133, BF869456, AI865022, |
| | | | | | AW196390, AA729793, AW050752, |
| | | | | | AI829248, BF896969, AW006740, AW196980, AI989644, |
| | | | | | AW050892, AW025728, BE463887, |
| | | | | | BF755327, AI816737, BF221884, AW009307, AI452837, |
| | | | | | AI985048, AI990376, BF882183, AA421085, |
| | | | | | AA885063, AI701658, AW015700, BE046026, AW575887, |
| | | | | | AW138417, AW002832, AA603726, |
| | | | | | AI829182, AA490961, AW969133, AW192748, AA252626, |
| | | | | | AA877835, AW732209, AI474698, |
| | | | | | BF897876, AA768934, AA806669, AB011112.2, Z94796.1. |
| HMVBS81 | 158 | 639203 | 1-515 | 15-529 | AW080812, AW082817, AI951822, AW328562, BE138773, |
| | | | | | AI453744, AW246456, AW248692, |
| | | | | | AI953814, AA916922, AW166193, BE741575, AI189652, |
| | | | | | AI554578, BE207752, AW051430, AI143755, |
| | | | | | AW631158, AI378866, AA602780, AW166148, AI346750, |
| | | | | | AA402608, AI191618, AA643353, |
| | | | | | BE207747, AA703840, BF969135, AA503856, AI991172, |
| | | | | | AI150232, AI885695, BE312018, AA599791, |
| | | | | | BF940193, AI951334, AI192449, AI423588, AI089026, |
| | | | | | AI564055, AI160783, BE904552, BE675401, |
| | | | | | AA722619, AI333580, BE465600, AI147788, AI201929, |
| | | | | | N39330, AI806345, AA740539, AI359694, |
| | | | | | BF569026, BG111020, AW078736, W42999, AA915948, |
| | | | | | BG231541, AI453740, AA845228, AA128902, |
| | | | | | AI262427, BG111584, AW005011, AI191380, AA838219, |
| | | | | | N93880, AL529784, AI289245, AA975577, |
| | | | | | AA654241, BE270980, R17925, AA455946, AA858122, |
| | | | | | AL529713, AW070627, AW068993, |
| | | | | | AA480313, AW249124, AL530076, AL044257, AW381690, |
| | | | | | AW381728, AI073423, AW606063, |
| | | | | | AW381754, AW381773, W40373, H84216, AW381761, |
| | | | | | AW381723, AA032144, AW381716, |
| | | | | | AA639632, BE151932, AI284233, AW606042, AW606073, |
| | | | | | AL530075, AW381757, AW381711, |
| | | | | | BE151941, AW606072, H82810, AW328561, BE151934, |
| | | | | | AW606039, AI001133, D20808, F35123, |
| | | | | | AW606054, AW381758, F21453, BE909136, AI866123, |
| | | | | | T50401, AL526916, AA126629, AA282016, |
| | | | | | AW881457, AA308337, AA134834, AW364188, BG024191, |
| | | | | | AL529714, AI220753, AW601155, |
| | | | | | AI186566, H48575, BE908027, BE265069, AW469208, |
| | | | | | BF531105, AW182036, BE733058, AI202946, |
| | | | | | BE409400, AW250560, BE408657, AA774739, BE514152, |
| | | | | | AI902442, AA448447, BE792882, |
| | | | | | BE269512, AW951942, W45258, AW381677, AW885253, |
| | | | | | BF125578, AW885254, AW996198, H48844, |
| | | | | | AA402390, AI874330, AA032143, BF806199, BC001299.1, |
| | | | | | AF004876.1. |
| HMWDC28 | 159 | 460487 | 1-1132 | 15-1146 | BF511110, BF511098, BF507863, W52839, AW194969, |
| | | | | | AI199267, R68505, AI521938, R46033, |
| | | | | | W81166, BE000169, N47371, BE814496, W81165, |
| | | | | | AA086195, T64991, AI827849, AI816972, |
| | | | | | BF592053, AI797732. |
| HMWFT65 | 160 | 562063 | 1-1332 | 15-1346 | AW795416, AL121287, AL133445.4, Z85996.1, AL034548.25, |
| | | | | | Z98304.1, AC004953.1, |
| | | | | | AC068799.14, AC074121.16, AC004905.1, AL031431.8, AC003982.1, |
| | | | | | AC006487.8, |
| | | | | | AC005971.5, AL050335.32, AL009181.1, AC010271.6, AC006483.3. |
| HNEEE24 | 161 | 553558 | 1-1065 | 15-1079 | BE695767, H18634, R44271, AA022988, AA454219, |
| | | | | | AA454220, AA022950, AA429414, BF112103, |
| | | | | | AI183463, AW293235, AA584870, AI608821, AA564655, |
| | | | | | AI467968, H69890, Z95152.1, Z77249.1, |
| | | | | | AC004837.1, AL050335.32, AC009399.5, AF222686.1, AD000090.1, |
| | | | | | AC069539.4, |
| | | | | | AL139080.11, AL117338.15, AC005000.2, AP000427.3, AF039905.1, |
| | | | | | AC027319.5, AC004996.1, |
| | | | | | AC010328.4, AP000043.1, AP000111.1, AP001716.1, AP000424.3, |
| | | | | | AP000292.1, AC073321.4, |
| | | | | | AL133330.14, AL138743.5, AL050338.12, AL445423.13, AC068715.5, |
| | | | | | AC009003.7, |
| | | | | | AL450026.10, AC008493.4, AL355334.26, AC002300.1. |
| HNFFC43 | 162 | 753337 | 1-2089 | 15-2103 | AL048903, AI678076, BF527660, BE728354, BF317174, |
| | | | | | BE409263, AL530934, AL042801, BE729268, |
| | | | | | AL041340, AL530935, BE314879, AL042802, AW190561, |
| | | | | | BE313085, AI961484, AU154235, |
| | | | | | AU132769, AW027201, AI424792, AL524550, AA864499, |
| | | | | | AI432437, AA917094, AI934618, |
| | | | | | BE327057, BE383358, AI499074, AI344032, AI955647, |
| | | | | | BG253760, AA572961, AL048902, AW769938, |
| | | | | | BF509684, BE208853, AI342638, AI761488, AW732625, |
| | | | | | BE259667, AW974120, AI564533, W51904, |
| | | | | | AW961340, AI289643, AW971194, AW272378, BE297579, |
| | | | | | AI867205, AI796156, AA884306, |
| | | | | | BF002574, BF927739, BE885728, BF847648, AA456581, |
| | | | | | AA918441, AL524551, BF918942, AI766564, |
| | | | | | AW769937, AA493778, BF918936, AA304712, BF869582, |
| | | | | | AI168435, AU126961, AA298993, |
| | | | | | AA377693, AW769673, AI383037, H67555, AA322347, |
| | | | | | AA221032, AA713594, AI366484, AL039675, |
| | | | | | BE273248, F24965, AW797208, AA426295, AA322180, |
| | | | | | AA322590, BF919436, BF919454, BF919453, |
| | | | | | BF919451, AW178871, AI538564, BF752997, AI766348, |
| | | | | | AI701097, AW080090, AI367680, BF812961, |
| | | | | | AI619820, AI633125, AI828682, AI818240, AW152182, |
| | | | | | BF811804, AI796113, BF968679, BF669151, |
| | | | | | AI800648, AI500714, AI702073, AI884318, AI590043, |
| | | | | | AI868680, BG122005, AA740450, AI866469, |
| | | | | | AI971615, AI345415, AI934259, AI570056, AI433157, |
| | | | | | AL046466, AI819545, AI499570, AI698391, |
| | | | | | AI440448, AI915291, AI434731, AI445829, AI889189, |
| | | | | | AI638644, AI370623, AW188525, AW008226, |
| | | | | | AI699823, T69241, AI635634, AW148363, AI818350, |
| | | | | | AW089844, AI686817, AI376425, AI609375, |
| | | | | | AW051088, AI744268, AV736995, BF970652, AI569637, |
| | | | | | AW163834, AI270295, BE393784, AI471282, |
| | | | | | AW075381, AL043355, AI872423, AI801460, AI620864, |
| | | | | | W74529, AI421252, BF812938, AW081256, |
| | | | | | AI581362, AL513817, AW193911, AI670009, AI871697, |
| | | | | | AI537261, AI950729, AV709679, AI651840, |
| | | | | | AI281757, AI619502, AI591387, AW168822, AI473536, |
| | | | | | AW196720, AI345612, AI620056, AW834282, |
| | | | | | AL046595, AI677796, AI582932, N21402, AI922266, |
| | | | | | AI500061, AI474646, AI345416, AW079409, |
| | | | | | AA641818, AI621341, AI702068, AW081383, AI633198, |
| | | | | | BF814761, AI619662, T49776, AI565172, |
| | | | | | AI696714, AV747571, AI524179, BF766531, AI366900, |
| | | | | | AI521560, BF925771, AI927233, AI536638, |
| | | | | | AI479292, AI564719, AW027898, AI419826, AI432969, |
| | | | | | AI432030, AI799183, AW238688, AI932966, |
| | | | | | AI354643, AW168788, AI401697, AI357940, AI890214, |
| | | | | | AW078712, AI250627, AI636507, AI357273, |
| | | | | | AI634345, AI579901, AI352497, AV711455, AW104724, |
| | | | | | AL514079, AI783825, AI612852, AI956080, |
| | | | | | AI524654, AW104827, AI445025, AI815232, AW198090, |
| | | | | | AI684244, AL513761, AW078606, |
| | | | | | AW083374, AA830709, AW192652, AK001356.1, AF260728.1, |
| | | | | | AL137599.1, AK001651.1, |
| | | | | | BC008337.1, AB033000.1, AF351620.1, AF183393.1, AL389935.1, |
| | | | | | BC003573.1, AK026408.1, |
| | | | | | AL117587.1, BC008591.1, AL080159.1, BC006103.1, AK026462.1, |
| | | | | | AL137530.1, BC002466.1, |
| | | | | | AK026744.1, AK026593.1, BC003101.1, AL133075.1, AL137537.1, |
| | | | | | BC005825.1, AK000418.1, |
| | | | | | AL136850.1, AL023657.1, BC001199.1, AK026389.1, BC004945.1, |
| | | | | | L19437.2, BC004349.1, |
| | | | | | AL122104.1, AL050149.1, AL389982.1, BC006181.1, BC001964.1, |
| | | | | | AB047878.1, BC002631.1, |
| | | | | | AL050138.1, AB050410.1, AB050421.1, BC006345.1, AK000414.1, |
| | | | | | S76508.1, BC008686.1, |
| | | | | | AF115392.1, AL389947.1, AF232009.1, AL050155.1, AL050366.1, |
| | | | | | AB050510.1, AK026464.1, |
| | | | | | AF131821.1, AK027144.1, AL137533.1, BC003658.1, AF245044.1, |
| | | | | | AB052176.1, AL137711.1, |
| | | | | | AF274348.1, AF274347.1, AL137480.1, BC002733.1, AL359941.1, |
| | | | | | AL133637.1, X82434.1, |
| | | | | | BC008364.1, AL080146.1, BC004925.1, AB060897.1, BC005168.1, |
| | | | | | AB056421.1, Z82022.1, |
| | | | | | BC002970.1, BC003590.1, AL353940.1, BC001844.1, BC004264.1, |
| | | | | | AL049452.1, AL117416.1, |
| | | | | | BC008717.1, AF132730.1, AB050431.1, AF090903.1, D83032.1, |
| | | | | | AK026633.1, AK025889.1, |
| | | | | | AL162083.1, AL137271.1, AF218006.1, BC003569.1, AK027204.1, |
| | | | | | BC004336.1, AL583915.1, |
| | | | | | BC001655.1, BC006287.1, X99971.1, AL080148.1, AL110280.1, |
| | | | | | AL137476.1, AF205073.1, |
| | | | | | BC008063.1, AB060916.1, X59812.1, BC003684.1, AL137292.1, |
| | | | | | AL133077.1, BC006487.1, |
| | | | | | AK027096.1, BC001785.1, AK027173.1, BC006410.1, S77771.1, |
| | | | | | Y14314.1, AL133062.1, |
| | | | | | AL050143.1, AF044323.1, AF195092.1, AY033593.1, X15132.1, |
| | | | | | BC003410.1, BC005678.1, |
| | | | | | AL080154.1, AK000636.1, AB055331.1, AF339775.1, AK025435.1, |
| | | | | | BC008037.1, BC006458.1, |
| | | | | | AL122100.1, U73682.1, AL133619.1, M85164.1, AF230496.1, |
| | | | | | AL442083.1, AL137574.1, |
| | | | | | AF285167.1, BC005002.1, AF169154.1, AF038847.1, AL136615.1, |
| | | | | | AK027095.1, AL162003.1, |
| | | | | | BC003056.1, AL390184.1, BC007571.1, AK025350.1, AL110221.1, |
| | | | | | AK024747.1, AF262032.1, |
| | | | | | AF106862.1, AL136805.1, AL133665.1, AC006288.1, AF002672.1, |
| | | | | | AK026556.1, BC004181.1, |
| | | | | | AL133084.1, BC002365.1, AK024992.1, BC007206.1, BC000550.1, |
| | | | | | BC006091.1, AB048913.1, |
| | | | | | AK026746.1, AL110158.1, AF184965.1, X78627.1, AB047627.1, |
| | | | | | AL133623.1, BC009294.1, |
| | | | | | AY034001.1, AK026532.1, AL162002.1, AF026816.2, BC000199.1, |
| | | | | | BC008649.1, BC003591.1, |
| | | | | | AJ299431.1, Y13350.1, AK025099.1, BC004362.1, BC007460.1, |
| | | | | | AL512733.1, AB056420.1, |
| | | | | | BC008075.1, BC000090.1, AK025798.1, AF106697.1, AL136889.1, |
| | | | | | AL136893.1, AF199509.1, |
| | | | | | AF124728.1, U37359.1, AK025113.1, BC008078.1, BC004556.1, |
| | | | | | AF202636.1, D44497.1, |
| | | | | | AL133049.1, AF061573.2, AL157433.1, AL136784.1, BC008417.1, |
| | | | | | BC005070.1, AK026528.1, |
| | | | | | AL137478.1, X83544.1, AB060834.1, AL136844.1, AK000266.1, |
| | | | | | AL357195.1, AK027160.1, |
| | | | | | BC001305.1, AL137488.1, AL117435.1, X99226.1, BC004222.1, |
| | | | | | AL137550.1, AL161628.9, |
| | | | | | BC007021.1, Y14040.1, AF218000.1, AF141289.1, AK026613.1, |
| | | | | | AL117460.1, AF126488.1, |
| | | | | | AL080139.1, AK027365.1, AJ296345.1, AL137298.1, AL137716.1, |
| | | | | | Z35309.1, AL137627.1, |
| | | | | | AK000476.1, AK026550.1, AL359624.1, AL389939.1, AB048953.1, |
| | | | | | AL512684.1, BC000253.1, |
| | | | | | BC002370.1, BC002849.1, AF217987.1. |
| HNFIY77 | 164 | 634551 | 1-1198 | 15-1212 | BE778688, AA350580, AW451334, BE247283, BE242191, |
| | | | | | AI640492, AA078462, BE242141, |
| | | | | | AW003105, AA336368, R54889, AI910199, AI871293, |
| | | | | | AI267818, BF204188, AI858691, AC009412.6, |
| | | | | | AC072052.6, AL033517.1, AL161747.5, AC018897.4, AC005663.2, |
| | | | | | AL139095.15, AL135744.4, |
| | | | | | AC008072.3, AC005484.2, AL121897.32, AP000359.1, AC079141.7, |
| | | | | | AC020955.6. |
| HNFJF07 | 165 | 577013 | 1-602 | 15-616 | AA487061, AA486615, D78759, AC002091.1, AC004089.25, |
| | | | | | AC005015.2, AC039056.7, |
| | | | | | AC006329.5, AC005081.3, AC084693.2, U91323.1, AC002352.1, |
| | | | | | U82668.1, AL391259.15, |
| | | | | | AL109897.30. |
| HNGDJ72 | 166 | 532619 | 1-510 | 15-524 | AC027689.10. |
| HNGEP09 | 167 | 499076 | 1-1028 | 15-1042 | AW275971, AI369580, AW576034, AL353692.14, AC004638.1, |
| | | | | | AC027319.5, AC007011.1, |
| | | | | | AL354932.26, AK000932.1, AC074121.16, AC019171.4, AL390374.16, |
| | | | | | AJ400877.1, |
| | | | | | AL158830.17, AL109897.30, AC008403.6, AL121929.17, AC016025.12, |
| | | | | | AC002390.1, |
| | | | | | AL360227.17, AL049709.18, AL353777.18, AC004890.2, AC005098.2, |
| | | | | | AC005015.2, |
| | | | | | AL354794.16, AL590762.1, AC020931.5, AP001695.1, AC005052.2, |
| | | | | | AL121754.18, |
| | | | | | AC073655.26, AC004166.12, AC005225.2, AC010328.4, AC004876.2, |
| | | | | | AL133353.6, |
| | | | | | AP000553.1, AL136418.4, AL139054.1, AC004985.2, AL354873.19, |
| | | | | | AL121897.32, AC003962.1, |
| | | | | | AL121972.17, AC011472.7, AC011462.4, AC073316.6, AC079602.15, |
| | | | | | AL590763.1, |
| | | | | | AL023575.1, AC007216.2, AC005049.2, AL139095.15, AC005033.1, |
| | | | | | AD000092.1, AL133453.3, |
| | | | | | AC011514.3, AC008072.3, AC009123.6, AC006130.1, AC005899.1, |
| | | | | | AC005800.1, AC016995.4, |
| | | | | | AL021368.1, AP003439.2, AC005740.1, AC004893.1, AC013726.7, |
| | | | | | AC007546.5, AL031727.42, |
| | | | | | AL109984.14, AC005280.3, AC020629.6, AL445490.6, AP000067.1, |
| | | | | | AC003010.1, AP000506.1, |
| | | | | | AC004520.1, AL121586.31, AB043547.1, AP000501.1, AC007030.3, |
| | | | | | AE006467.1, AC012476.8, |
| | | | | | AL512347.14, AC010203.13, AC004217.1, AL133387.8, AC051619.7, |
| | | | | | AC002504.1, |
| | | | | | AL096791.12, AL133347.28, AC004826.3, AC004910.1, AL031663.2, |
| | | | | | AC006544.19, |
| | | | | | AC069282.6, AF111168.2, AC005089.2, AC002551.1, AC020908.6, |
| | | | | | AL022323.7, AC011443.6, |
| | | | | | AC005914.1, AF001548.1, AC010271.6, AL049569.13, AC079630.18, |
| | | | | | Z93015.9, AL133246.2, |
| | | | | | AL356299.16, AC002984.1, AL121658.2, AC006088.1, AC006349.3, |
| | | | | | AC006125.1, |
| | | | | | AL096840.25, AC005971.5, AB000882.1, AC005519.3, Z93241.11, |
| | | | | | AL031447.4, AF196969.1, |
| | | | | | AC007686.5, AC005041.2, AC016587.7, AC009144.5, AC010618.7, |
| | | | | | AC009137.6, AL121903.13, |
| | | | | | AL512378.7, AC024028.10, AL117381.32, AC008392.6, AP003357.2, |
| | | | | | AL137162.25, |
| | | | | | AL139317.5, AC004626.1, AC006329.5, AL139396.17, AC007956.5, |
| | | | | | AC020552.4, |
| | | | | | AL139352.16, AC003065.1. |
| HNGFR31 | 168 | 553552 | 1-522 | 15-536 | AL360297.12, AC005023.1, AC022124.5, AC008390.7, AC004836.2, |
| | | | | | AL136984.20, |
| | | | | | AC009558.14, AL117373.14, AP002350.3, AC006265.1, AC007057.3, |
| | | | | | AL139233.8, AC005079.6, |
| | | | | | AL359824.17, AP001541.4, AP000426.3, AJ239322.3. |
| HNGIJ31 | 169 | 519120 | 1-782 | 15-796 | AU147901, AA376128, BE562634, AC051619.7, AC020629.6, |
| | | | | | AL445531.10, AC009412.6, |
| | | | | | AC005052.2, AC079383.17, AL009172.1, AC016637.6, AK022380.1, |
| | | | | | AC004032.7, AP000555.1, |
| | | | | | AC009789.21, Z83851.17, AL359643.27, AC011005.7, AC008521.5, |
| | | | | | AC008635.6. |
| HNGND37 | 171 | 839224 | 1-827 | 15-841 | AA774312, BE670568, AI298480, BE702731, AI088824, |
| | | | | | AI149772, AA976633, AI870274, AA010606, |
| | | | | | AA010607, AW957725, AA010628, T33898, T75431, |
| | | | | | AI355909, AC005300.10, AC006946.20, |
| | | | | | AF307451.1. |
| HNGOI12 | 172 | 1041375 | 1-2114 | 15-2128 | AJ006345.1, AC005950.1, AC003675.1, AC001228.1. |
| HNHEU93 | 173 | 634851 | 1-734 | 15-748 | AW502688, AW410844, AI444575, AW504667, AW157128, |
| | | | | | AV758849, AW974923, AI038029, |
| | | | | | AA533011, AW021674, AW731858, AA618531, AA554289, |
| | | | | | AA557945, AA046906, AI065031, |
| | | | | | AW963552, AL121039, BG180320, AI702049, BG059139, |
| | | | | | AA157876, BE080768, AI567676, AI745666, |
| | | | | | AV732057, AW953437, N72678, H53546, AL044966, |
| | | | | | BF942991, BF679568, BF724416, AI003068, |
| | | | | | BG059924, AA640305, BF439153, H47461, AA507623, |
| | | | | | AI921744, AA935827, AW265468, BF589864, |
| | | | | | AA831714, AW020682, AI572680, AA601336, AI791720, |
| | | | | | AI791408, BE049409, AI114755, AW962971, |
| | | | | | AI828721, AU158433, BE244547, AI251024, AV730440, |
| | | | | | AW148821, AW474825, AA631915, |
| | | | | | AI791659, AA595661, AA610644, AW023975, AA657392, |
| | | | | | AW029626, AA834891, AI884404, |
| | | | | | AV743067, AI890283, BF944618, AI609992, AI797998, |
| | | | | | AW970856, BG223384, BE677164, BE150831, |
| | | | | | AW836225, AA658890, BE882869, AI031759, BF913232, |
| | | | | | AA493245, N55076, AA019793, AA523718, |
| | | | | | AI888050, H48017, AW576388, AV763460, AW192930, |
| | | | | | AI076729, AW021847, BF431825, AA652675, |
| | | | | | AI708565, AA315052, AI734076, AI281622, AI064968, |
| | | | | | AI538404, BF950367, AL138262, AA632355, |
| | | | | | BE676988, AA527633, AI052366, AI445699, BF849260, |
| | | | | | AI634466, AW960129, AL523272, AA411337, |
| | | | | | AI640905, AV729090, AI312267, AI570067, AV728973, |
| | | | | | AW675677, AI701898, BE676910, BF973510, |
| | | | | | AI889614, BG250794, AI571094, AW239465, BF725844, |
| | | | | | R92703, BE391183, AW028376, AA578711, |
| | | | | | AL590005.6, AC055740.17, AC090950.1, AL161757.4, AL391375.11, |
| | | | | | AL158063.12, |
| | | | | | AC022542.4, AP002898.1, AL161779.32, AL109804.41, AL157700.13, |
| | | | | | AL136123.19, |
| | | | | | AL359397.3, AL359273.11, AC007597.3, AP001781.4, AL121932.19, |
| | | | | | AL109847.5, |
| | | | | | AL109825.23, AL163209.2, AL390838.26, AC011740.7, AL138880.14, |
| | | | | | AL137918.4, |
| | | | | | AL139109.14, AL031229.2, AL035427.17, AL354937.12, AC005303.1, |
| | | | | | AC006249.1, |
| | | | | | AC006487.8, AP001713.1, AF334404.1, AC002312.1, AC018653.29, |
| | | | | | AL138499.4, AP000486.5, |
| | | | | | AC072061.8, AC005181.1, AL137818.3, AC011816.17, AL162430.15, |
| | | | | | AL158167.15, |
| | | | | | AL035400.13, AP000263.1, AL109758.2, AC005844.7, AL139396.17, |
| | | | | | AC025165.27, |
| | | | | | AP000080.1, AL354696.11, AC008651.7, AL354861.11, AL157915.3, |
| | | | | | AC010585.6, AC007256.5, |
| | | | | | AL513548.8, AC005779.1, AC007912.6, AL360227.17, AC008280.4, |
| | | | | | AC012150.16, |
| | | | | | AL109627.18, AC025436.2, AC008498.3, AF205588.1, Z95327.1, |
| | | | | | AL355305.9, AC068319.4, |
| | | | | | AL136418.4, AL139054.1, AL357075.17, AL022578.1, AP003548.2, |
| | | | | | AL132778.6, AB026898.1, |
| | | | | | AL132709.5, AL121989.12, AC005972.1, AL163301.2, AC002302.1, |
| | | | | | AL137129.4, AC034191.5, |
| | | | | | AC002550.1, AC007097.4, AL139021.6, AC006079.1, AL139095.15, |
| | | | | | AC011247.10, |
| | | | | | AL138755.13, AL021808.1, AC073964.3, AL121594.6, AL137782.9, |
| | | | | | AC016950.8, AL133328.13, |
| | | | | | AL137128.4, AC022367.34, AL138920.11, AC025207.5, AL357150.7, |
| | | | | | AC008536.6, |
| | | | | | AC005291.1, AC005754.1, AL049712.12, AL354816.5, AL513342.7, |
| | | | | | AL390039.10, AC002990.1, |
| | | | | | AF111167.2, AB020868.1, AL022069.1, AL355343.18, AL160411.25, |
| | | | | | AC005036.1, AC018719.4, |
| | | | | | AL139389.16, AC005228.1, AC002996.1, AL049835.3, AC090509.1, |
| | | | | | AC010000.5, AC090005.1, |
| | | | | | AL161936.15, AC020558.4, AL583856.6, AP002392.3, AL031643.1, |
| | | | | | AE000661.1, AC016608.5, |
| | | | | | AL162853.17, AL031659.9, AC005079.6, AC009953.4, AL121865.7, |
| | | | | | AL109854.10, AC002395.1, |
| | | | | | AL391601.6, AC073125.5, AL161892.9, AL133373.5, AC019184.3, |
| | | | | | AC009137.6, Z84483.1, |
| | | | | | AC002381.1, AC017099.11, AL162426.20, AL136234.12, AC009955.4, |
| | | | | | Z99716.4, AL117337.25, |
| | | | | | AL138743.5, AC011005.7, AC007543.4, AC004847.3, AC008901.5, |
| | | | | | AC009961.11, AL135783.6, |
| | | | | | AF229163.1, Z84480.1, AL122057.4, AL035455.30, AC016644.7, |
| | | | | | AJ400879.1, AL590387.7, |
| | | | | | AL158828.14, AC089985.14, AC069548.4, AC016831.1, AC009481.4, |
| | | | | | AC027129.5, |
| | | | | | AL022165.1, AL162503.12, AL022067.1, AC016705.4, AC002524.1, |
| | | | | | AL137140.12, |
| | | | | | AL109865.36, AC010583.5, Z98036.1, AC008518.3, AC008155.9, |
| | | | | | AL079295.1, AL033527.26, |
| | | | | | AC007277.2, AC007363.3, AL162231.20, AC013751.6, AL163218.2, |
| | | | | | AC068724.7, AE000658.1, |
| | | | | | AC006543.7, AP001646.4, AL451075.15, AC020601.10, AC012157.20, |
| | | | | | AC006581.16, |
| | | | | | AL360232.24, AP002534.1, AL132986.4, AC000353.27, AC007308.13, |
| | | | | | AP001727.1, |
| | | | | | AC008268.3, AL049646.19, AC006461.2, AL356118.15, AL445483.13, |
| | | | | | AC007345.5, |
| | | | | | AL442167.1, AC007956.5, AC006544.19, AC008569.6. |
| HNHFM14 | 174 | 664507 | 1-283 | 15-297 | AC020552.4. |
| HNHFR04 | 175 | 646709 | 1-1667 | 15-1681 | AC012354.8. |
| HNHNB29 | 176 | 895462 | 1-1880 | 15-1894 | AI049955, AA904211, AI921765, AU146342, R98218, |
| | | | | | BF725178, BF337320, AA515728, AL524675, |
| | | | | | BF772474, BG057207, BE675681, BE063437, BF804385, |
| | | | | | AI962030, R74433, BF724699, AV656063, |
| | | | | | AI499954, AI653776, AI523074, AI362442, AU118374, |
| | | | | | AW023302, AW957372, BE150793, AV763026, |
| | | | | | AV763058, BE281645, AW410354, AL038842, AW963444, |
| | | | | | AW403829, AA503298, AI709307, |
| | | | | | AW023111, AA825827, AV756491, AU158454, BF877926, |
| | | | | | AA713705, BG236484, AI735609, |
| | | | | | AW082104, AW780190, AV760014, AI254779, AA558404, |
| | | | | | AV719392, AA502532, AI114704, |
| | | | | | AA833875, AA833896, AA832145, AW957600, AA644090, |
| | | | | | BE072475, AW575605, AV703785, |
| | | | | | AW503420, AW973992, AI802087, BE301610, AW302017, |
| | | | | | AV738383, AW237905, AI859438, |
| | | | | | BF760573, AW962611, AV733437, BF944736, AV647070, |
| | | | | | AW513789, BG110818, AA581247, |
| | | | | | AI687343, BF854308, AW970958, AW615560, AI755057, |
| | | | | | AU157093, AI821987, BG222875, |
| | | | | | AA714110, AI732869, AA811741, AW849714, AL079734, |
| | | | | | AI889995, AA452887, AW978041, |
| | | | | | AV740009, AV764259, AA084609, H63660, AI587349, |
| | | | | | AW965008, AW190484, BE677244, |
| | | | | | AW501542, AW236219, BF217723, AA056248, AW843204, |
| | | | | | AV695478, AA633875, AW978591, |
| | | | | | AW192373, AW957154, AA604831, AW303872, AI141130, |
| | | | | | BF977305, AA297776, AI160786, |
| | | | | | AU151428, AU150634, AW083934, AA613624, AW051819, |
| | | | | | AI961983, BE968477, AW510513, |
| | | | | | AI417469, AC084881.19, Y10196.1, AL357515.26, AC005736.1, |
| | | | | | AL139396.17, AL356415.26, |
| | | | | | AC006241.1, AC006121.1, AL590763.1, AL022316.2, AL096677.21, |
| | | | | | AC016597.4, AF053356.1, |
| | | | | | AC002996.1, AL158040.13, AC012320.6, AC013434.8, AL109843.25, |
| | | | | | AC009194.8, |
| | | | | | AL356020.3, AC002425.1, AL133448.4, AC020916.7, AC005081.3, |
| | | | | | AL161731.20, AC078846.2, |
| | | | | | Z83819.1, AC011247.10, AL139317.5, AL022323.7, U95090.1, |
| | | | | | AC007225.2, AC083884.6, |
| | | | | | D86995.1, AC020913.6, AL356915.19, AL050349.27, AC023425.20, |
| | | | | | AC034242.5, AP001705.1, |
| | | | | | AC008946.6, Z95331.2, AP002008.5, Z98752.16, AC005920.1, |
| | | | | | AL157838.24, AL135839.15, |
| | | | | | Z93023.1, AC002045.1, AC005522.2, AC010419.5, AC016655.6, |
| | | | | | AC008616.6, AP001718.1, |
| | | | | | AL161669.5, AL035684.25, AP001752.1, AC002369.1, U95739.1, |
| | | | | | AC026794.4, AC015982.9, |
| | | | | | AL121586.31, AC009087.4, AC026202.6, AC008733.7, AL133477.16, |
| | | | | | AC005015.2, |
| | | | | | AL023575.1, AC007685.2, AC008397.7, AC018644.6, AL137061.12, |
| | | | | | AP001922.4, AC011442.5, |
| | | | | | AC006430.22, AC008766.4, AL132639.4, AC018821.4, AC006334.3, |
| | | | | | AC002492.1, |
| | | | | | AL157372.18, AC002073.1, AP000501.1, AC011465.4, AC022404.7, |
| | | | | | AC018639.8, AL135783.6, |
| | | | | | AL358434.16, AL031295.1, AL353807.18, AL157791.4, Z99716.4, |
| | | | | | Z83844.5, AP001709.1, |
| | | | | | AL031311.1, AC006040.3, AC067941.7, AC009032.7, AC007404.4, |
| | | | | | AL022326.1, AC018523.9, |
| | | | | | AC008755.6, AC008622.5, AC009996.7, AC008403.6, AC000353.27, |
| | | | | | AP001728.1, AP002007.4, |
| | | | | | AP000152.1, AC011287.4, AL021026.1, AC090950.1, AL049643.12, |
| | | | | | AL392106.4, AP001711.1, |
| | | | | | AC006028.3, AC008745.6, Z83822.1, AL136040.5, AC025280.4, |
| | | | | | AC010150.3, AB001523.1, |
| | | | | | AL159191.4, AC078957.16, AC020906.6, AL096701.14, AL138920.11, |
| | | | | | AC010271.6, |
| | | | | | AC022116.5, AL162426.20, AC004685.1, AC025159.28, AL139353.3, |
| | | | | | AF139813.1, AC007462.2, |
| | | | | | AC008904.6, AC013355.7, AL390241.19, AC022217.5, AC009165.6, |
| | | | | | AC004491.1, AP001670.1, |
| | | | | | AC007546.5, AL121899.37, AL162584.9, AB000882.1, AL121652.2, |
| | | | | | AC004000.1, AL139099.2, |
| | | | | | AC034251.5, AL136300.22, AC022425.6, AL031843.2, AL163032.3, |
| | | | | | AL162503.12, AC011472.7, |
| | | | | | AC009365.9, AL049757.14, AP001753.1, AC007249.5, AL354864.16, |
| | | | | | AC005006.2, |
| | | | | | AL117381.32, AC072052.6, AC027644.9, AC011508.4, AC074344.5, |
| | | | | | AL365475.1, AC002375.1, |
| | | | | | AF104455.1, AC000134.14, AC004840.3, AL139186.16, AL139809.16, |
| | | | | | AC007383.4, |
| | | | | | AP002851.2, AL118497.9, AL137078.20, AL022159.1, AC003025.1, |
| | | | | | AC005014.1, AC011479.6, |
| | | | | | AC007220.4, AC007242.3, AC084865.2, AL109759.4, AC012099.4, |
| | | | | | AL035604.15, AC005088.2, |
| | | | | | AC005666.1, AC006013.3, AC006205.7, AC084732.1, Z98044.13, |
| | | | | | AL137853.12, AL118502.38, |
| | | | | | AL390211.1, AL078461.38, AC008264.10, Z83826.12, AF124523.1, |
| | | | | | AC004975.2, AL133153.3, |
| | | | | | AL158214.33, AD000671.1, AF312915.1, AF279660.2, Z94044.1, |
| | | | | | AL021546.1, AC009269.6, |
| | | | | | AC010742.4, AF196779.1, AL031228.1, AC004099.1, AC008962.8, |
| | | | | | AC008626.5, AC011452.6, |
| | | | | | AL354735.14, AL354928.9, AC002314.1, AL449264.18, AL118506.27, |
| | | | | | AC021016.4, U80017.1, |
| | | | | | AC004477.1, AC008738.6, AC003085.1, AC004230.1, AJ295844.1, |
| | | | | | AC007114.7, AL109801.13, |
| | | | | | AC010378.6, AF200465.1, AJ300188.1, AC004832.3, AC005057.2, |
| | | | | | AC020915.6, Z97054.1, |
| | | | | | AC007664.12, AC009220.10, U91326.1, AL031433.4, AP001727.1, |
| | | | | | AC004757.1, AL109798.19, |
| | | | | | AC008074.3, AC003962.1, AC005228.1, AL133551.13. |
| HNHOD46 | 177 | 843488 | 1-1341 | 15-1355 | AV700498, BG164166, AV700988, AV700545, AL037632, |
| | | | | | AV762783, BG260565, AV714931, |
| | | | | | AV760723, AF074667, BF792326, AF034176, BE796439, |
| | | | | | AW962035, AW976010, AA524604, |
| | | | | | AV760360, BE541237, AU118837, AV719941, BF678427, |
| | | | | | AL138265, AW188427, AV733710, |
| | | | | | AL048626, AU117926, BE909125, AV764490, AU119532, |
| | | | | | BE067011, AL534817, AV699709, |
| | | | | | AV686853, AV722030, BE393367, BE538259, AA708751, |
| | | | | | AI732911, BF346320, AW970915, |
| | | | | | AA526787, AW131249, AU147226, AV763174, AV760497, |
| | | | | | BF805173, BF968141, AV762900, |
| | | | | | AV759711, AV759356, AV760364, BF307044, AV762902, |
| | | | | | BF679169, AV759686, AV762779, |
| | | | | | AW963982, AL042906, AV759684, AV762001, AV759683, |
| | | | | | AL135377, AV734543, AW408643, |
| | | | | | AU155227, AV759046, AA601355, BF913258, BE273856, |
| | | | | | AL044340, AA081138, AI952885, |
| | | | | | AA584482, AV734401, AL042905, AV722075, AV737621, |
| | | | | | BF666736, AA211734, AW080062, |
| | | | | | AV762002, AV761309, AI791227, AW961160, AV763305, |
| | | | | | AI038990, AV759172, AW102955, |
| | | | | | AA708108, BF381650, BF828714, AI685198, AI679294, |
| | | | | | BE066950, AV763952, AA831913, AI679871, |
| | | | | | AU145521, AI204309, AW151713, AW069670, AA481760, |
| | | | | | BF892846, AW130036, AV763135, |
| | | | | | AU140392, AA284247, AW102811, AA722372, AW008212, |
| | | | | | AU158859, AA640277, U51704, |
| | | | | | AU155168, BG258140, AW088689, AU155048, AA577824, |
| | | | | | BE387734, BE867712, AL119123, |
| | | | | | AW079809, AA601326, BF968610, AA515829, AC008440.8, |
| | | | | | AC011531.7, AC002302.1, |
| | | | | | AC027319.5, AC005484.2, AC005972.1, AC010469.7, AL109743.4, |
| | | | | | AC005077.5, AL035398.19, |
| | | | | | AC020916.7, AC022211.5, AC002301.1, AC018808.4, AP001711.1, |
| | | | | | AC008745.6, AC000052.16, |
| | | | | | AL035587.5, AC008720.6, AC007421.12, AC003101.1, AC034193.4, |
| | | | | | AC025593.5, AC006511.5, |
| | | | | | AF045555.1, AC007374.6, AL096814.26, AC005081.3, AL445685.17, |
| | | | | | AJ400877.1, AC004985.2, |
| | | | | | AC020558.4, AC009516.19, AC008443.8, AL031447.4, AC006028.3, |
| | | | | | AL121992.24, |
| | | | | | AC011465.4, AC008655.6, AC008616.6, AL135928.6, AL513550.9, |
| | | | | | AL031295.1, AL050335.32, |
| | | | | | AL049780.4, AC005052.2, AL390060.14, AC011005.7, AP001717.1, |
| | | | | | AB023049.1, AC007000.2, |
| | | | | | U82668.1, AC005840.2, AC006530.4, AF111168.2, AC018809.4, |
| | | | | | AC002477.1, AC011443.6, |
| | | | | | AC018751.30, AC008622.5, AC023058.17, L78833.1, AC007956.5, |
| | | | | | Z85986.1, AC072052.6, |
| | | | | | AL137067.7, AC018635.6, AC002059.3, AC004824.3, AC026172.3, |
| | | | | | AC018506.4, AP000116.1, |
| | | | | | AL135927.14, AC007227.3, AL445248.7, AL590763.1, AC005914.1, |
| | | | | | AP001727.1, AL158207.15, |
| | | | | | AC010320.9, AP000557.2, AL050318.13, AL139809.16, AC008764.7, |
| | | | | | AC004882.2, |
| | | | | | AC007731.14, AJ312686.1, AC008969.5, AC004965.2, AC005037.2, |
| | | | | | AC000353.27, AC027130.5, |
| | | | | | AC087590.1, AL513008.14, AC005520.2, AC005088.2, AL133244.1, |
| | | | | | AC008551.5, |
| | | | | | AL109976.23, AC011461.4, AL132639.4, AC005089.2, AC010492.7, |
| | | | | | AC009244.24, |
| | | | | | AC006930.1, AC007318.4, AC005098.2, AC005399.19, AC005529.7, |
| | | | | | AC004859.2, AL031584.1, |
| | | | | | AL160471.5, AL391139.19, AF111169.2, AL133448.4, AL451125.7, |
| | | | | | AP001670.1, AC011890.4, |
| | | | | | AC005231.2, AF030453.1, AC010527.5, AL034420.16, AC009247.12, |
| | | | | | AC010328.4, |
| | | | | | AC073657.5, AC006120.1, AL117692.5, AP000512.1, AL161452.19, |
| | | | | | AC022382.3, AL445435.11, |
| | | | | | AC005722.1, AC005632.2, AL162426.20, AL138721.16, AL163636.6, |
| | | | | | AL049766.14, |
| | | | | | AL137792.11, AL391827.18, AC004815.2, AL135901.23, AC020983.7, |
| | | | | | AC021036.5, |
| | | | | | AL162724.16, AL590762.1, AC011500.7, AC005736.1, AL022312.7, |
| | | | | | AP003357.2, AL158830.17, |
| | | | | | AC004089.25, AC006538.1, AP000212.1, AC008760.6, AL450226.1, |
| | | | | | AL163249.2, AC009002.5, |
| | | | | | AL121658.2, AF200465.1, AC025438.5, AC091118.2, AC008736.6, |
| | | | | | AL121601.13, AC004583.1, |
| | | | | | AC019205.4, AC010326.6, AC007676.19, AC018638.5, AC008755.6, |
| | | | | | AF001549.1, AC003109.1, |
| | | | | | AC009194.8, AL021578.4, AF064861.1, AC011247.10, AL354808.24, |
| | | | | | AP001718.1, |
| | | | | | AL355480.22, AC005015.2, AL079335.29, AC002299.1, AL035086.12, |
| | | | | | AC005368.1, |
| | | | | | AL357515.26, AF168787.1, AC074270.25, Z95152.1, AC002470.17, |
| | | | | | AP001752.1, AC005070.1, |
| | | | | | AC005332.1, AC005619.1, AC010458.5, AF196779.1, AC006285.11, |
| | | | | | AC010422.7, AC010463.6, |
| | | | | | AC004813.2, AC024561.4, AC007097.4, AC005280.3, AL096701.14, |
| | | | | | AC002985.1, |
| | | | | | AC007957.36, AL034379.8, AC004257.1, AL033529.25, AL359092.14, |
| | | | | | Z93023.1, AP001725.1, |
| | | | | | AL357560.11, AC022261.8, AL031681.16, AC025166.7, AC007999.12, |
| | | | | | AC005874.3, |
| | | | | | AF134471.1, AC016025.12, AC006254.10, AC004148.1, U95742.1, |
| | | | | | AC026464.6, AC011462.4, |
| | | | | | AC005821.1, AC003110.1, AC009756.9, AC011442.5, U78027.1, |
| | | | | | AC007619.22, AC010605.4, |
| | | | | | AL117344.12, AL121975.9, AL136300.22, AC006337.4, AL157838.24, |
| | | | | | AL158040.13, |
| | | | | | AC006970.6, AC007488.15, AC000026.3, AC008687.4, AC018720.5, |
| | | | | | Z84487.2, AL445222.9, |
| | | | | | AL132855.4, AC006480.3, AL031286.1, AC004906.3, AF196971.1, |
| | | | | | Z83843.1, AC003043.1. |
| HNTBI26 | 178 | 1310821 | 1-1368 | 15-1382 | AL528533, AL520935, AL521290, AL515806, AL520965, |
| | | | | | BE293492, AL520936, AL515807, |
| | | | | | AW972854, AV753139, BG178370, BF968317, AL520966, |
| | | | | | BE780476, BE305183, AI678037, |
| | | | | | AW293248, AL521291, AI269883, BF978348, AA894746, |
| | | | | | AI493776, AA778869, AI424848, AA525497, |
| | | | | | BF307374, AA622403, BG109953, N21347, AI095265, |
| | | | | | BF792489, AL519236, AA564674, BE249905, |
| | | | | | AI268502, AA995849, AA894745, AI249680, AW087844, |
| | | | | | AI300762, N72839, AI244187, AI089147, |
| | | | | | AI368934, AI740804, AI339842, AW516709, BF315359, |
| | | | | | AI335796, AW192649, AW801578, N28008, |
| | | | | | AI095231, BF977145, BF977663, BF765528, BE778762, |
| | | | | | BE875935, AI951011, BF669511, BG033337, |
| | | | | | AW393151, AL519237, AW819092, AW393138, BE868896, |
| | | | | | AV691113, BE875559, AV693124, |
| | | | | | BF976999, BF690855, AI127890, BE293585, AW984556, |
| | | | | | BF994881, AW090182, W76593, AA362394, |
| | | | | | AI906642, BE741647, T57136, AW753803, BF813621, |
| | | | | | AA533658, BF882501, AI638644, AI370623, |
| | | | | | AI698391, AA806720, T49776, AW008226, AI568293, |
| | | | | | AI332957, BE393784, AI590043, AI954721, |
| | | | | | AW128834, AI364167, AI419826, AW166870, AI884318, |
| | | | | | AI685005, AI473799, AI699823, AI440239, |
| | | | | | AI956080, AI393038, AI889189, AI621341, BG119543, |
| | | | | | AW166583, AW105296, AI580451, AI634345, |
| | | | | | BE966496, AI619820, AI570807, AW834282, AI499570, |
| | | | | | AI500113, AI620864, AI684369, AI633125, |
| | | | | | AW983832, AW103928, BF752997, BF727091, BF761618, |
| | | | | | AI254731, AW087934, AI802542, |
| | | | | | BE964556, AI927233, AI538564, AI270706, AW148882, |
| | | | | | AI915291, AW152182, N21402, AL046466, |
| | | | | | AA019328, BF811804, AI678446, AI473536, BF669151, |
| | | | | | AA102339, AW130362, AI653402, AI869765, |
| | | | | | AI270183, AI613038, BE965129, BG122005, AI950729, |
| | | | | | AI540821, AI700358, AI266652, AI701097, |
| | | | | | AW004606, AW198090, AW262552, AI934011, AI282669, |
| | | | | | AI349482, AI612913, AW084873, |
| | | | | | AI125015, BE963426, AI695857, AI636588, AI610446, |
| | | | | | AI572096, AI689157, AW075671, BF812960, |
| | | | | | BF996654, AI799183, AI687127, AI866419, AI824688, |
| | | | | | AI866040, AI824576, BE895003, AI683563, |
| | | | | | AW029489, AI540350, AI499890, BE963355, AI951950, |
| | | | | | BF724420, BG251076, AI421149, AI567513, |
| | | | | | AI866469, AI932966, AW129659, AI474146, AI298321, |
| | | | | | BE275487, AI816306, BE961919, AI539260, |
| | | | | | AW243451, AL080011, AA878142, AI567769, AV720998, |
| | | | | | AI524626, AI096481, AI470717, BF814527, |
| | | | | | AW102794, BE963310, AI478723, AI800341, AW089726, |
| | | | | | AI912434, AI648509, AI499963, AI673363, |
| | | | | | AF086351.1, AL117587.1, AL050366.1, BC008591.1, AB056106.1, |
| | | | | | X78627.1, X99971.1, |
| | | | | | BC004945.1, BC005825.1, AL080159.1, BC001199.1, BC003573.1, |
| | | | | | AL080148.1, AL080146.1, |
| | | | | | AK027095.1, AL136752.1, AC004942.1, AB047627.1, X68560.1, |
| | | | | | BC004416.1, AL133619.1, |
| | | | | | BC006181.1, AL133084.1, AF044323.1, BC004373.1, AK027052.1, |
| | | | | | AK026408.1, AL133653.1, |
| | | | | | AL133559.1, AF126488.1, BC008063.1, AL136850.1, BC001236.1, |
| | | | | | BC002373.1, Z82022.1, |
| | | | | | BC005123.1, AL139099.2, AL162066.1, AK025350.1, AL110280.1, |
| | | | | | AB056420.1, BC006345.1, |
| | | | | | AB050431.1, BC002349.1, Y14314.1, AK026210.1, AL137682.1, |
| | | | | | AC006288.1, AF115392.1, |
| | | | | | AK026182.1, AL133062.1, AL162729.8, BC008708.1, AK026746.1, |
| | | | | | AL357195.1, AL050155.1, |
| | | | | | BC002849.1, AB047878.1, AK000484.1, AJ299431.1, L25851.2, |
| | | | | | AC016706.6, BC004349.1, |
| | | | | | AL050149.1, AL137478.1. |
| HNTBL27 | 179 | 545534 | 1-777 | 15-791 | AW169270, BF475369, AL524823, BE903984, AL530691, |
| | | | | | BE536833, BG230736, BE881512, |
| | | | | | BF033804, AA716162, AW183635, AI188277, AI141766, |
| | | | | | AI624087, AW173452, AI129419, AI683124, |
| | | | | | BE903838, AI828817, AI308087, BE544869, BF061917, |
| | | | | | AW291854, BE880241, AW471490, |
| | | | | | AW615124, AA701470, BF447518, AW025680, BF094269, |
| | | | | | AW449210, AA315210, BG251005, |
| | | | | | AW504333, AI239598, BE697836, BE742666, AI284846, |
| | | | | | AI355748, BE899398, BG027544, BF352604, |
| | | | | | AW376334, AW376337, AW752527, AW194025, AI890712, |
| | | | | | AI565340, BC006846.1. |
| HNTCE26 | 180 | 1160395 | 1-2149 | 15-2163 | BG252201, AV726464, AL529709, BE894106, AV726994, |
| | | | | | BF970560, BF132059, BF977798, AI703275, |
| | | | | | AW512938, BG164577, AL529708, AI767521, AI823746, |
| | | | | | BE220262, AA583438, AI143608, |
| | | | | | AW468337, AI949854, AV727138, AI620344, AI209187, |
| | | | | | AI630993, BG007081, AI004986, AI565892, |
| | | | | | AV715169, AI367983, BF056815, AW394003, R70620, |
| | | | | | BG007658, AA152183, BF381743, AA565300, |
| | | | | | AA088574, AA931697, AA995899, AI025252, AA297479, |
| | | | | | T84083, AW138535, H71679, Z45535, |
| | | | | | AA297478, AI865989, AA367654, AA150060, AA044326, |
| | | | | | AW338484, D29436, R24591, AI005551, |
| | | | | | H00983, H39751, AI669105, T83438, BF091777, |
| | | | | | AW138127, R21165, BF083909, BE934286, R76620, |
| | | | | | AA971307, AA745052, AW945769, AI554153, T84151, |
| | | | | | BE550213, H01724, AW051517, AW373316, |
| | | | | | AW373313, T89390, BF083903, BE541509, AA180271, |
| | | | | | AI263504, AF303588.1, AF140242.1, |
| | | | | | AL133390.7, AF056032.1. |
| HNTNC20 | 181 | 700627 | 1-1965 | 15-1979 | BG179496, BG254440, AA573206, AI735586, BE326906, |
| | | | | | AA131359, BF668303, AI522318, AI376670, |
| | | | | | AW241377, BE350501, AA452451, AA131240, AW242329, |
| | | | | | AI540415. |
| HNTSY18 | 183 | 1041383 | 1-1797 | 15-1811 | AW470226, BF058886, AI692966, BF058139, BE218656, |
| | | | | | AI281699, AI241829, AA613450, |
| | | | | | AC004877.1, AL137162.25, AJ400879.1, AC011551.3. |
| HOCNF19 | 184 | 835049 | 1-1104 | 15-1118 | F02459, Z17835, AI264655, BE011950, AV729096, |
| | | | | | N77968, BF807259, AA658839, AI076081, |
| | | | | | AW804948, BF987026, AC008078.11, AP002898.1, AL157369.7, |
| | | | | | AP002392.3, AC010999.6, |
| | | | | | AL353581.14, AC007383.4, AL133551.13, AL161659.17, AL132772.14, |
| | | | | | L81392.1, L81391.1, |
| | | | | | AC005317.1. |
| HODDF13 | 185 | 684307 | 1-816 | 15-830 | AC011245.8. |
| HODDN92 | 186 | 422913 | 1-1925 | 15-1939 | BG116781, BG110501, BE150456, AI742087, AA453725, |
| | | | | | AI917507, AW769479, AI860142, BE326465, |
| | | | | | AI459289, AI860141, AW963123, BE646467, AA868553, |
| | | | | | AW872412, AW971193, AW277065, |
| | | | | | AI921333, BF576826, AI024689, BE466760, AI354470, |
| | | | | | AI005467, AW103830, BE045272, AI827987, |
| | | | | | AA442638, BF109829, AA813604, N28268, AA442648, |
| | | | | | AA563934, N63406, AA833517, AA663108, |
| | | | | | AA437299, AA632986, AA436880, N58885, AA812876, |
| | | | | | AA447794, AA442379, N58892, AW020895, |
| | | | | | AA522837, AA600372, AA229448, T78981, AA663178, |
| | | | | | AV693238, AI187977, AV696576, AI472712, |
| | | | | | AA229164, T85178, AW270324, AV683374, R64648, |
| | | | | | AA333708, AA703066, AW961515, BE093710, |
| | | | | | T78927, R64655, BF802058, R95914, T84294, |
| | | | | | AA551512, AA460220, AI916737, R31132, AA359583, |
| | | | | | AI217018, N56349, AI191725, BE835233, BE835385, |
| | | | | | T84796, AV741009, BE835410, AI084517, |
| | | | | | N83238, AW362842, AA247541, R31089, T91125, |
| | | | | | AA493776, BE818350, BE818352, AI253986, |
| | | | | | R31247, AW303285, N95696, BE708493, AA678297, |
| | | | | | AI003856, BE818343, N95562, AW024721, |
| | | | | | AA862707, N95587, AA401399, AA399957, AW511080, |
| | | | | | AL157879.7, AL021368.1, AL009030.15, |
| | | | | | AL049987.1, AL133255.13, AL390738.4. |
| HODEJ32 | 187 | 835027 | 1-725 | 15-739 | AI671275, Z69713.2. |
| HOFMQ33 | 188 | 1184465 | 1-2396 | 15-2410 | AL528504, AU121718, AI820674, T94707, AJ224741.1, |
| | | | | | Y13341.1, AC079145.3, AJ001047.1. |
| HOHBY44 | 189 | 873264 | 1-3355 | 15-3369 | AW604409, AI037867, AW604404, AW368603, AW151676, |
| | | | | | AW383192, BE696058, BE927254, |
| | | | | | BF431876, AI753734, AI754387, BE696055, AW044602, |
| | | | | | AW383224, AI041650, AW383194, AI750595, |
| | | | | | AW383164, AI884505, W52686, AW069006, BG256681, |
| | | | | | AW842507, AW956164, AI750594, |
| | | | | | AA600082, AW078795, AI753050, AI802788, AW190902, |
| | | | | | AI750578, AW957491, BF055368, |
| | | | | | AI041803, AI621183, AW631119, AI750577, AW383125, |
| | | | | | BF215485, AA599801, AW087935, N31127, |
| | | | | | BE696060, W51909, AI087351, W47324, AA071381, |
| | | | | | W48619, AA670070, W48852, N35377, |
| | | | | | AI752124, AI090390, W42791, W47325, N28395, |
| | | | | | N28453, BE693590, BE693587, AI085102, AI678451, |
| | | | | | AA545734, W42884, AA373348, AI302125, AI910477, |
| | | | | | H80042, AA071138, AA669811, AW361415, |
| | | | | | AW069430, AA788723, AW069485, AW853798, AI940729, |
| | | | | | AI754608, AW580737, AA376403, |
| | | | | | BF508389, AA373673, H99469, AA373544, AW473621, |
| | | | | | BF881941, AI888605, AA373014, AI940705, |
| | | | | | AA373975, N27040, C01826, AA373298, AA112124, |
| | | | | | AA084001, BE140157, AI940795, AA372833, |
| | | | | | BE140143, BE140150, AW005943, BE140098, BE140177, |
| | | | | | BE140175, BE140179, BE140161, |
| | | | | | BE140145, BE140148, BE140155, BE140167, BE140163, |
| | | | | | BE140147, BE140158, BE140149, BE140176, |
| | | | | | BE140107, BE140146, BE140152, BE140144, BE140099, |
| | | | | | BE140102, BE140166, BE140116, BE140156, |
| | | | | | BE140173, BE933516, BE140174, BE140104, AW239511, |
| | | | | | BG108248, BE140160, BE140171, |
| | | | | | BE140105, AI521673, BE140109, BE140164, BE140172, |
| | | | | | AW806615, BF109257, AW138508, |
| | | | | | BF217716, BE140108, AI932934, BE140103, AA373557, |
| | | | | | BE140153, BE140117, AA344024, W25447, |
| | | | | | AW806557, AI537571, BE140162, C01953, AI476777, |
| | | | | | AW583945, AF110137.2, AL359060.1, |
| | | | | | AL359059.1, AF154054.1, AB032372.1, AF045800.1. |
| HOSBY40 | 191 | 589431 | 1-1131 | 15-1145 | BE465874, BE465890, AW418562, AW814995, AA721114, |
| | | | | | AC002543.1. |
| HOSDJ25 | 192 | 854234 | 1-2200 | 15-2214 | AL521533, BF966564, BG109192, BE621548, BG259805, |
| | | | | | BF666690, BF667661, BF185318, BF666019, |
| | | | | | BE621125, AI433432, AW963800, BE883279, BF028488, |
| | | | | | BF667980, BF196902, BF111775, BF667265, |
| | | | | | BF664922, BF966437, BF667218, AI277896, BF028500, |
| | | | | | AI401346, BF696865, BF698781, BG169528, |
| | | | | | BF696312, AW338135, AI280253, AA873621, AI435513, |
| | | | | | BE552077, BF699387, BF055949, BF697521, |
| | | | | | BE542555, AI277959, AA121788, AI961880, AW969937, |
| | | | | | BF478121, AW338124, AA528626, |
| | | | | | AW367010, R76478, AA101422, T62844, AI918990, |
| | | | | | BE167397, W72961, AA876737, R28131, |
| | | | | | BE176581, AA375127, BF332407, AI365181, W73131, |
| | | | | | T62693, W21429, N92911, BF570557, |
| | | | | | AI077290, AA127501, R66340, AI926197, C00153, |
| | | | | | AA813575, R28517, AI580500, AI222072, |
| | | | | | AI033269, AA758476, W86851, AV661704, AV725920, |
| | | | | | AV728997, AV704234, AV726624, AV655280, |
| | | | | | AV729378, AV708992, AV727787, AV709407, AV654908, |
| | | | | | AV660608, AV652001, AV656903, |
| | | | | | AV707541, AV706854, AV702117, AV726738, AV728733, |
| | | | | | AV708834, AV687035, AV697196, |
| | | | | | AV708704, AV659322, AV656478, AV698545, AV709314, |
| | | | | | AV708381, AV660728, AV691080, |
| | | | | | AV651955, AV703169, AV728518, AW952409, AV709660, |
| | | | | | AV729220, AV696866, AV726816, |
| | | | | | AV695545, AV656283, AV708025, AV707933, AV684604, |
| | | | | | AV708980, AV692691, AV701914, |
| | | | | | AV705159, AV702516, AV693523, AV726103, AV727029, |
| | | | | | AV725826, AV725134, AV705280, |
| | | | | | AV702994, AV683272, AV697288, AV652156, AV728670, |
| | | | | | AV708723, AV729263, AV707510, |
| | | | | | AV699089, AV658863, AV701560, AV727776, AV698609, |
| | | | | | AV696106, AV706744, AV708438, |
| | | | | | AW951263, AV689111, AV728157, AV708109, AV692345, |
| | | | | | AV704553, AV683443, AV708893, |
| | | | | | AV659536, AV706219, AV658275, AV705693, AW960720, |
| | | | | | AV686064, AV705632, AV706721, |
| | | | | | AV701067, AV709604, AV704955, AV701707, AV707753, |
| | | | | | AV706089, AV704269, AV703495, |
| | | | | | AV702021, AV706677, AW960326, AV709869, AV656256, |
| | | | | | AV687909, AW954031, AV702832, |
| | | | | | AV708622, AV729259, AV726784, AV702833, AV707296, |
| | | | | | AV707767, AW958647, AV654896, |
| | | | | | AV645906, AV728806, AV652617, AV703599, AV727990, |
| | | | | | AV701580, AV708004, AV727003, |
| | | | | | AV703970, AV727526, AV727799, AV728471, AV703472, |
| | | | | | AV702147, AV686060, AV726156, |
| | | | | | AV649758, AV706342, AV702266, AV729189, AW953965, |
| | | | | | AV696931, AV698429, AV692972, |
| | | | | | AV685688, AV689800, AV693005, AV709390, AW953787, |
| | | | | | AW952414, AV722222, AV645936, |
| | | | | | AW955653, AV706185, AV684075, AW951618, AV658332, |
| | | | | | AV703168, AV648263, AV705384, |
| | | | | | AV707024, AV727807, AW952410, AV707792, AV726259, |
| | | | | | AW955723, AV706279, AW954439, |
| | | | | | AV647659, AV725617, AV698583, BC005700.1, AL137163.1, |
| | | | | | Z83826.12, AF086333.1, |
| | | | | | AF217994.1, Y08991.1. |
| HOUCQ17 | 193 | 429229 | 1-4698 | 15-4712 | AI810627, BF344199, BG056542, BG118486, AI126019, |
| | | | | | BE784908, AW954313, W07142, AA133346, |
| | | | | | BE047207, AV700629, AW163200, AI692832, BF589805, |
| | | | | | AW195344, AI755040, AW964293, |
| | | | | | AI890478, BE856510, BF370410, AW168050, AI985641, |
| | | | | | AI926525, AI369060, AI654583, AI571069, |
| | | | | | AU158513, AW167394, AI129429, BF244275, AW474740, |
| | | | | | AI887177, BF083290, AA993528, N91530, |
| | | | | | AI148739, BE925407, AW001362, AA022464, BF203604, |
| | | | | | AW194129, BF590332, AI144408, AI335849, |
| | | | | | AI342643, C18560, AI089584, BE934752, AI128171, |
| | | | | | BF476695, AI889755, AA677116, AW613713, |
| | | | | | AW163724, AA011376, AI684137, AI953558, AI097021, |
| | | | | | AA029247, BF589929, W47316, AA129732, |
| | | | | | AI168616, N59612, H98678, AV725614, AI280406, |
| | | | | | AI160430, AW080654, AU156318, AA834490, |
| | | | | | AI368138, AW207161, AI690716, AA677837, AA031474, |
| | | | | | AW104712, AW474712, AI559164, |
| | | | | | AA662930, W92688, W35345, AA057170, BF759760, |
| | | | | | AI340202, AI569560, AI185000, AI199506, |
| | | | | | AA757215, N40523, AA151507, BF221465, RI9976, |
| | | | | | W47201, AI769318, T86778, N95765, AA595069, |
| | | | | | AI128696, W92831, N29991, T95293, AA028027, |
| | | | | | AA903074, AA703651, W24878, AA918632, Z43925, |
| | | | | | AI027793, AA328867, AA634915, AW967361, AA846139, |
| | | | | | AW204001, AI537176, N27243, AI859558, |
| | | | | | BF437005, AI921704, AI040586, R13547, AI719476, |
| | | | | | H28325, AW630984, AI765271, AA987460, |
| | | | | | R76276, W23529, N36334, AI270245, H28326, |
| | | | | | AI160028, H27128, AA345812, AA368429, AA373718, |
| | | | | | AA011364, AI370696, AI537518, AA296523, H89564, |
| | | | | | R20636, T40492, AI827556, BF197787, |
| | | | | | AA807465, AL047040, T95373, AI686088, H89565, |
| | | | | | R20667, R76553, N88341, AI689182, AW150550, |
| | | | | | T36271, AI932695, N46572, BF993688, T39243, |
| | | | | | AA781059, BE933134, AW050514, C03600, Z41664, |
| | | | | | AA088617, AA904875, AA897320, BG055227, AW050517, |
| | | | | | T86685, AI648649, AA040690, BE767617, |
| | | | | | BF370964, AA031616, AA029035, AI369552, AU140483, |
| | | | | | T10738, R45078, AW150472, AI933450, |
| | | | | | T41144, AA028018, AW630434, T40309, BE936581, |
| | | | | | BF370970, AA022997, BF370966, AW470024, |
| | | | | | AA706779, AV721513, AW804344, AA776485, AI191274, |
| | | | | | AW844411, T41173, BF307057, AI224577, |
| | | | | | BE838061, AW858526, AW604723, AW392670, AW858525, |
| | | | | | U46347, AL043003, AW363220, |
| | | | | | AW384394, AW861889, AW858455, AW804686, AL119457, |
| | | | | | AW604726, AL119399, AL119484, |
| | | | | | BE695785, AW861944, AL119396, AL119439, U46351, |
| | | | | | AL119324, AL119319, BE705903, Z99396, |
| | | | | | BE705906, AW577135, AL119522, U46350, AW372827, |
| | | | | | U46349, AL119483, AW877209, AL119391, |
| | | | | | BF868684, AL119497, AF170084.1, AB037767.1, AF207664.1, |
| | | | | | AF060152.1, AL162080.1, |
| | | | | | AP001697.1, AP001598.1, AP001599.1, AK023795.1, AL355724.1, |
| | | | | | AL355723.1, AB026436.1. |
| HPEAD79 | 194 | 520202 | 1-799 | 15-813 | AC004590.1, AC069275.3, AL117382.28, AC002094.1, AP002852.3, |
| | | | | | AC009955.4, |
| | | | | | AC055740.17, AC011470.5, AC004965.2, AF109907.1, AC078846.2, |
| | | | | | AL109804.41, |
| | | | | | AC008745.6, AL121653.2, AC018832.4, AC018738.4, AC009502.4, |
| | | | | | AL136137.15, AC016543.6, |
| | | | | | AL121579.4, AL161670.4, AL353679.18, AL096701.14, AC025097.41, |
| | | | | | AC011449.6, |
| | | | | | AC006345.4, AC007637.9, AC003029.2, AL050341.18, AL353135.32, |
| | | | | | AC008403.6, |
| | | | | | AL365499.19, AC008764.7, AC023472.4, AC006449.19, AL513008.14, |
| | | | | | AC012306.11, |
| | | | | | AC005632.2, AC005041.2, AJ011930.1, AL163300.2, AL034405.16, |
| | | | | | AL109865.36, |
| | | | | | AC074121.16, AC090051.8, AC004962.1, AL096814.26, AC007666.12, |
| | | | | | AL161911.17, |
| | | | | | AF053356.1, AL109897.30. |
| HPIBO15 | 195 | 1310868 | 1-1725 | 15-1739 | AI056404, AI802391, AW270724, AI750249, N41425, |
| | | | | | N47678, AI188511, AI376981, AA029314, |
| | | | | | AW452123, BE466507, N39755, AI937190, AA063620, |
| | | | | | AA693737, AI139466, AA701241, AI250789, |
| | | | | | AI672263, AI198257, BF055537, AI199035, AA677064, |
| | | | | | W69895, AA040154, BF196981, W73711, |
| | | | | | AA029867, W69841, BF222273, AW900121, AW022270, |
| | | | | | W69574, AI373227, AI200161, AA701858, |
| | | | | | AV690112, AW044223, W69662, AI052153, AA872860, |
| | | | | | H29417, H29324, N26312, AI283749, |
| | | | | | AA036704, AI383659, AA332627, N47677, AI424682, |
| | | | | | BE089934, AA329748, AW952484. |
| HPJBI33 | 196 | 685699 | 1-1663 | 15-1677 | AI679782, BE796439, AV763892, BE387734, AW303196, |
| | | | | | AW301350, AW274349, AL046409, |
| | | | | | AI204304, AU148742, AL048142, F36273, BF475381, |
| | | | | | BE156019, AL041690, BE872393, N94311, |
| | | | | | BG236735, AA599480, AW630298, AW473163, AI754955, |
| | | | | | BF683672, AI281881, AW276827, |
| | | | | | AI341548, BF806176, AW467362, BF805094, BF940837, |
| | | | | | AV762050, BE350475, AA631507, |
| | | | | | AV652936, AW963497, BF965007, AV681599, BE042649, |
| | | | | | AV762139, AW080939, AW276435, |
| | | | | | AI291268, AI291124, AW339568, AU154961, AA426277, |
| | | | | | AI133164, AW088616, AI951863, |
| | | | | | AW873530, BF816072, AL038785, AW148792, AW338086, |
| | | | | | BE869857, AW408717, BE042475, |
| | | | | | AI580652, AA525190, AL044940, AV760466, AV713243, |
| | | | | | AW969694, AI537955, AC005527.3, |
| | | | | | AL050318.13, AC010279.4, AC000025.2, AF134726.1, AC008736.6, |
| | | | | | AC004983.2, AC004965.2, |
| | | | | | AL162458.10, AC009269.6, AC020552.4, U91321.1, AL136179.15, |
| | | | | | AC011455.6, AC020916.7, |
| | | | | | AC084783.2, AC009244.24, AL133332.12, AC009144.5, AC005755.1, |
| | | | | | AC013449.8, U95740.1, |
| | | | | | AC010319.7, AP001725.1, AC008068.4, AC011497.6, AL021546.1, |
| | | | | | AL121586.31, AC004971.3, |
| | | | | | AL021391.2, AC007055.3, AC011464.5, AC010422.7, AC006430.22, |
| | | | | | AL390738.4, |
| | | | | | AL109805.14, AC006483.3, AL033528.19, AP001716.1, AF053356.1, |
| | | | | | AP000112.1, |
| | | | | | AL160271.19, AL157882.5, AL022323.7, AC018751.30, AL121900.26, |
| | | | | | AL356354.10, |
| | | | | | AL121897.32, AC006435.7, AL160471.5, AC027689.10, AC004878.2, |
| | | | | | AL121903.13, |
| | | | | | AL121890.34, AP000044.1, AP000513.1, AC004662.1, AC027319.5, |
| | | | | | AC011236.8, AC008738.6, |
| | | | | | AL136980.5, AC020904.6, AL132640.4, AC009516.19, AC018506.4, |
| | | | | | AJ400877.1, AC003003.1, |
| | | | | | AC016587.7, AC004847.3, AC012476.8, AP000555.1, AC020931.5, |
| | | | | | AC018719.4, AC003029.2, |
| | | | | | Z93241.11, AC004797.1, AL031281.6, AP001741.1, AC016894.7, |
| | | | | | AL033529.25, AC068533.7, |
| | | | | | AC011479.6, AJ003147.1, AL163248.2, AC022148.5, AP001727.1, |
| | | | | | AL031602.14, AC008403.6, |
| | | | | | AL139021.6, AC005488.2, AC006329.5, AC079602.15, AC020754.4, |
| | | | | | AC005736.1, AC004841.2, |
| | | | | | AL022316.2, AC003684.1, U47924.1, AL031733.3, AL365225.12, |
| | | | | | AL356915.19, AC008622.5, |
| | | | | | AC008073.4, AL050349.27, AL353135.32, AC005231.2, AC004707.1, |
| | | | | | AC022083.6, |
| | | | | | AL121585.22, AC005015.2, AL137800.12, AC016025.12, AC010616.5, |
| | | | | | AP001726.1, |
| | | | | | AC027644.9, AC034198.6, AC005295.1, AC007956.5, AL139321.28, |
| | | | | | AC006050.1, |
| | | | | | AC069262.24, AC013434.8, AC004382.1, AC010553.6, AC006581.16, |
| | | | | | AC004638.1, |
| | | | | | AE006463.1, AC007739.2, AC007011.1, AL049537.48, AL049760.26, |
| | | | | | AC006211.1, AF109907.1, |
| | | | | | Z93015.9, AC011462.4, AC090710.16, AC005844.7, AC006312.8, |
| | | | | | AC002990.1, AC008474.7, |
| | | | | | AC011489.6, AC007272.3, AL136418.4, AL139054.1, AL136137.15, |
| | | | | | AL139352.16, |
| | | | | | AL109936.10, AC002365.1, AL353579.17, AC005080.2, AL355302.14, |
| | | | | | AP001710.1, |
| | | | | | AC009298.3, AC004858.2, AL035404.20, AC005531.1, AC008812.7, |
| | | | | | AC011491.5, |
| | | | | | AC024028.10, AC004089.25, AL035659.22, AL354932.26, AC005529.7, |
| | | | | | AC007226.3, |
| | | | | | AC006452.4, AB050050.1, AC005837.1, AF111168.2, AL109797.18, |
| | | | | | AL135838.5, AL355392.7, |
| | | | | | AL021155.1, AC005512.1, AL009181.1, AC009137.6, AC004491.1, |
| | | | | | AC018720.5, AL445686.14, |
| | | | | | Z97054.1, AC007686.5, AC023344.4, AC011005.7, AC007597.3, |
| | | | | | AC005562.1, AL133367.4, |
| | | | | | AC010618.7, AP000347.1, AC002369.1, AC004953.1, AC010654.8, |
| | | | | | AC005081.3, AC008946.6, |
| | | | | | AC025540.7, AC011495.6, AP001748.1, AL049869.6, AC011461.4, |
| | | | | | Z86090.10, AC002470.17, |
| | | | | | AL138724.12, AC009412.6, AC005840.2, AC008760.6, AJ009611.6, |
| | | | | | AC008985.6, AC011484.4, |
| | | | | | AC015982.9, AC002133.1, AL049709.18, AC011444.5, Z98200.8, |
| | | | | | AC010969.11, AL121652.2, |
| | | | | | AP002851.2, AC008372.6, AL022320.23, AL109965.34, AL096701.14, |
| | | | | | AL031584.1, |
| | | | | | AC018809.4, AJ400879.1, AC018808.4, AC008616.6, AL034405.16, |
| | | | | | AC016643.6, AC005077.5, |
| | | | | | AC008649.6, AP000045.1, AL355305.9, AP001610.1, AC005225.2, |
| | | | | | AL161626.20, AC020908.6, |
| | | | | | AC073542.4, AC023510.16, AC006538.1, AC008764.7, AC012170.6, |
| | | | | | Z85996.1, AC003070.1, |
| | | | | | AC005778.1, AC022384.4, AC005037.2, AC020550.4, AL137140.12, |
| | | | | | AC004859.2. |
| HPJBK12 | 197 | 1011467 | 1-2634 | 15-2648 | AP001206.3, AP001329.3. |
| HPJCL22 | 198 | 1146674 | 1-3093 | 15-3107 | AU140137, AW273142, BF511622, AW500031, AW997852, |
| | | | | | AW997845, AW997846, BE263631, |
| | | | | | AW997843, AI457507, AW449421, AW451219, BE047152, |
| | | | | | BF946370, BF439925, BF946380, |
| | | | | | AI200349, BF897509, BF512501, Z19075, BE827516, |
| | | | | | BF094042, BF094020, BE244735, AA325330, |
| | | | | | AW962065, R31240, AI023715, AA736958, BF802328, |
| | | | | | BF988285, BG015997, AA215423, BF736763, |
| | | | | | AW997844, AA285156, AI254765, BF902055, BF724699, |
| | | | | | AV740801, AA847952, AA634889, |
| | | | | | AI284640, AA074818, AL134972, BF724366, AW274349, |
| | | | | | AV763138, AA468131, BF946053, |
| | | | | | BF945647, AV729809, AW303196, AI801148, AL038072, |
| | | | | | AA873777, AL133662.1, AB020720.1, |
| | | | | | AB051126.1, AK023742.1, AC020916.7, AL512802.2, AC005098.2, |
| | | | | | AL109758.2, AK024937.1, |
| | | | | | AL096701.14, Y11535.1, AL080243.21, AL137073.13, AL137059.20, |
| | | | | | AL590709.5, AP002378.3, |
| | | | | | AL158210.12, AC006064.9, AC002563.1, AP001064.1, AC017016.5, |
| | | | | | AC004836.2, AF238380.1, |
| | | | | | AL021918.1, AC018641.3, AL136162.17, AL035460.15, AC084356.22, |
| | | | | | AC005943.1, |
| | | | | | AL157877.11, AP000760.4, AC021752.5, AC011446.6, AL121895.26, |
| | | | | | AL451075.15, |
| | | | | | AC011308.8, U67829.1, AL034429.1, AL049776.3, AC003043.1, |
| | | | | | AF059321.1, AP001748.1, |
| | | | | | AC074115.4, AL133622.1, AC016138.8, AF052144.1, AL136295.3, |
| | | | | | AC005007.1, AC018618.5, |
| | | | | | AC026672.44, AC016597.4, AL136305.14, AL352979.4, AL133545.10, |
| | | | | | AL360169.17, |
| | | | | | AL031587.3, AC026184.3, AC074121.16, AC044797.5, AL117382.28, |
| | | | | | AL358293.4, |
| | | | | | AC007546.5, Z95152.1, AK022069.1, AC010618.7, AC011470.5, |
| | | | | | AL157912.5, AL022721.1, |
| | | | | | AC004084.1, AL157789.6, AL137495.1, AC005015.2, U07562.1, |
| | | | | | AC073492.18, AC005144.1, |
| | | | | | AC008635.6, AL035704.9, AC067722.21, AL121829.30, AE006464.1, |
| | | | | | AL590763.1, AL049610.9, |
| | | | | | AL137244.28, AL162272.10, AF254983.2, AP002371.3, AC010527.5, |
| | | | | | U73023.1, AC020904.6, |
| | | | | | U91322.1, AC012306.11, AL352984.4, AC020955.6, AC018523.9, |
| | | | | | AC004928.2, AF015156.1, |
| | | | | | U95739.1, AC027319.5, AL138717.6, AL163201.2, AC008555.5, |
| | | | | | AC011497.6, AC019206.4, |
| | | | | | AC007005.3, AC018504.4, AC020552.4, AC068313.4, AC004867.5, |
| | | | | | AL355392.7, AL021397.1, |
| | | | | | AC010312.4, Z97630.11. |
| HPMDK28 | 199 | 846357 | 1-1070 | 15-1084 | BG112660, BG025264, AL528310, BG168817, BE744551, |
| | | | | | BE877617, AI356771, BG163540, |
| | | | | | AA203523, BG031683, BF822950, AW592567, AA176981, |
| | | | | | AA904437, BF209639, BF312400, |
| | | | | | AU134583, BF194783, BF058517, BF445932, BF115227, |
| | | | | | BF732680, BF445936, AW303381, |
| | | | | | AW149649, AW027536, AW583459, AW475091, AA065227, |
| | | | | | BF869433, AW103970, AA703536, |
| | | | | | AA902103, AI735312, AI082224, BE262098, AW405660, |
| | | | | | AW009422, AA932869, BF940753, |
| | | | | | AI830877, AI830074, BG222176, AI742006, AI381584, |
| | | | | | AA133474, AI347025, BF869417, AI452483, |
| | | | | | AA993536, AW954279, BE737248, N66683, BE261151, |
| | | | | | AI369439, AI334008, AI005081, AL528309, |
| | | | | | BE166345, AA365303, BF222033, F32952, AI697441, |
| | | | | | AA488152, AI418548, BG248769, AI279351, |
| | | | | | AI888277, BF115544, AI200343, AA977299, AI612818, |
| | | | | | BE163359, AI830668, BE740423, AW574601, |
| | | | | | AA315546, BE397815, AA573402, BE004351, AA573411, |
| | | | | | AA633508, BF925742, AA741489, H82686, |
| | | | | | BF894571, AA065233, AA360707, AV728079, BG230581, |
| | | | | | N29979, BE561199, N98991, AW439071, |
| | | | | | AA744699, R73710, AW407745, AA877633, H99709, |
| | | | | | BF804312, AI381618, BF806994, BF806622, |
| | | | | | BF806680, BF807000, BF807012, AW407070, BF804328, |
| | | | | | BF807005, AU155517, AA933001, |
| | | | | | AA321772, W57549, BF806996, BE271504, H39645, |
| | | | | | H26855, BF807004, H82425, BF804308, |
| | | | | | BF975948, AI928746, R81659, R82397, BE791088, |
| | | | | | R73635, BE939764, AI688429, BE171442, |
| | | | | | BF378561, BE261882, BF818292, AA469038, AA913203, |
| | | | | | AA300974, BE171441, AA298641, |
| | | | | | AW999308, BF206994, BF807016, H26756, BF093709, |
| | | | | | AW884799, BF737549, AW797205, H11203, |
| | | | | | AA305598, R81461, BF773046, BF804289, AI738864, |
| | | | | | BE814697, H49134, H40077, AW889970, |
| | | | | | AI669504, BE561022, BE394911, AA911419, H40072, |
| | | | | | BF806979, R82344, AI701370, AI984879, |
| | | | | | AA064931, AI300423, AA380950, AI301586, BE902194, |
| | | | | | BE707909, AI983746, AA533457, AW803830, |
| | | | | | AA737402, AI926327, AI263788, R52293, F26866, |
| | | | | | AA827751, BF868527, AI168033, AI265814, |
| | | | | | AI264365, AW085104, AI982777, AW590204, AI381485, |
| | | | | | AI972009, AA580064, AA463767, |
| | | | | | AU130766, BE673288, BF109947, AA364441, BE464383, |
| | | | | | AI693626, AA133473, AW410601, |
| | | | | | AI685572, BF437257, AI279199, BF437797, BF064139, |
| | | | | | BE080941, BF059063, BE671687, AA064925, |
| | | | | | AI051392, BE348682, AI457365, AW341328, AW408516, |
| | | | | | AA622272, AA642661, Z21606, AA732692, |
| | | | | | AI261971, AA976709, BF091789, AW002951, BE163143, |
| | | | | | AI697458, T25507, AA341138, N86893, |
| | | | | | AI951605, BF058146, BE270120, BC008070.1, AK001809.1, |
| | | | | | AF277178.1, AK023110.1. |
| HRABA80 | 201 | 882176 | 1-1237 | 15-1251 | AU147250, F24079, AI791459, AI732503, AA523577, |
| | | | | | AI791342, AU121439, BF309840, BF308519, |
| | | | | | AI659402, AA719317, AA602233, AI752815, AW967109, |
| | | | | | AV694013, AA470486, AI218622, |
| | | | | | AA644545, AK022184.1, AC005777.1, AL031431.8, AC007406.1, |
| | | | | | AC032011.14, AC004143.1, |
| | | | | | AC006131.1, AC074121.16, AC005760.1, AC005529.7, AL354766.17, |
| | | | | | AC025166.7, |
| | | | | | AC012476.8, AC005544.1, AL035079.14, AL356299.16, AL031297.4, |
| | | | | | AC005778.1, AC011666.28. |
| HRACD15 | 202 | 871221 | 1-1525 | 15-1539 | AL519765, AL519766, BE910445, BF684654, BE270497, |
| | | | | | BE513843, BF975936, BE396890, BF973472, |
| | | | | | BE515166, BF686665, BE744708, BG257119, BE880162, |
| | | | | | BE797305, AW248552, BB514176, |
| | | | | | BE793786, BE791776, BE296702, BE271500, BE268991, |
| | | | | | AW512838, BE791090, BE727326, |
| | | | | | BF026627, BE797018, BE275277, BE277906, AU133849, |
| | | | | | AW248687, AU120611, BE270509, |
| | | | | | BF027092, BE384166, AI565668, BE513807, AW405789, |
| | | | | | AU151587, AA261853, AW043669, |
| | | | | | BE729554, AI949119, AW575486, AW751019, AI524253, |
| | | | | | BE391940, AW245114, AU145208, |
| | | | | | BE312276, BE796133, BE561087, AI953094, BE390017, |
| | | | | | AA283855, BE265439, BE391036, BE391843, |
| | | | | | AI620547, AW402545, AI075157, AI744741, BF125945, |
| | | | | | BF941740, W60104, BE266246, AW085553, |
| | | | | | AW131075, AI768378, AA401964, BE390215, AI752668, |
| | | | | | BE736619, AW967867, AI565659, |
| | | | | | BE387591, BE222775, AA283856, AW750999, AA261854, |
| | | | | | AI498229, AA830894, W60024, AA496293, |
| | | | | | AI660481, BE960924, BE277521, AA994223, AA868400, |
| | | | | | BF026241, BE382766, AI801124, BE671092, |
| | | | | | AI264882, AI355420, AW248994, BE503489, AI262893, |
| | | | | | AA583344, BE266582, AI832018, N29665, |
| | | | | | AA622755, AI439625, AI193362, BF446254, BE504260, |
| | | | | | BE387503, AW806699, AU146635, BE856089, |
| | | | | | AI087826, BF801189, AA133817, AA843858, AI287716, |
| | | | | | AA928793, AA699788, AI027345, BE728607, |
| | | | | | AW629986, W52804, T10369, AW103963, AA933691, |
| | | | | | BE138812, AI284845, AW264928, AW152071, |
| | | | | | AI265798, AI809041, AI038469, AW246086, AI435409, |
| | | | | | AV691151, AW957437, AI620834, AI452870, |
| | | | | | AI860541, AI475835, AI418409, AI744163, AW002187, |
| | | | | | AV692842, AI521647, AA845397, AI744800, |
| | | | | | AW002140, AI309558, AU118709, W96176, AW768771, |
| | | | | | BE207457, AW236670, AW264115, D29066, |
| | | | | | AA026580, AA135589, H55790, AW732194, BG006063, |
| | | | | | AI024919, AA256768, AI214884, AA280734, |
| | | | | | AA565467, R87509, BF056311, AA643222, AI024305, |
| | | | | | BF204467, AA077296, BF310268, W07856, |
| | | | | | T30234, R48997, AI435115, AI567828, AI537884, |
| | | | | | AW050631, AI740587, BE162565, BE149783, |
| | | | | | AW090152, T10368, AW627586, AI537596, AA622914, |
| | | | | | T50404, AW016161, W45022, AI274609, |
| | | | | | AA570075, AL039562, AA827726, AW246353, W04715, |
| | | | | | H89133, BF125722, AA626654, AW246566, |
| | | | | | AW519242, AI659744, AI752669, AW247535, AA077415, |
| | | | | | AW129363, AI202252, AA628809, |
| | | | | | BE869982, AI208476, BE206952, AW511835, AA037397, |
| | | | | | BF828156, BG031018, BE513491, |
| | | | | | BE736901, AW149144, AI189756, AA078651, BE513973, |
| | | | | | BF194732, H47888, AW954928, AA806404, |
| | | | | | AW080710, BF847605, AA077110, AA319080, AA101354, |
| | | | | | AI214676, AA434187, AA932091, |
| | | | | | BF837875, BE140453, AA428843, R11194, AA778244, |
| | | | | | AA077601, AW082443, N90686, AI675644, |
| | | | | | BF794477, W05073, AI520907, AL046053, AW298462, |
| | | | | | AA496322, T50535, BC008084.1, |
| | | | | | AK001129.1, AK021688.1, BC007488.1, AL117583.1, AC006014.2, |
| | | | | | AB014518.1, AC005488.2, |
| | | | | | Y16704.1, N54250, N81046, AA036807, AA135546, |
| | | | | | AA236044, AA262692, AA938381, AA204918, |
| | | | | | AA402082, AA455506, AA455507, AI217271. |
| HRACJ35 | 203 | 877666 | 1-2063 | 15-2077 | BE906771, BE218907, AI912661, BE670671, BG166321, |
| | | | | | AW167740, AI698131, AI796048, BF476110, |
| | | | | | AW952474, AW474992, AW149683, AI814137, BF436724, |
| | | | | | AA452391, AI635719, AI422285, |
| | | | | | AI675301, AW301634, AI800309, AI023300, AI269915, |
| | | | | | AA054467, BF062213, AI220479, AA991181, |
| | | | | | AI159765, W88683, AI623293, AI205308, AA043330, |
| | | | | | AA461136, BE669608, AI032982, AA634903, |
| | | | | | AI361429, AA877688, BF681677, AW868366, AI683625, |
| | | | | | AI094869, AI268543, AI040482, AA460833, |
| | | | | | AI042583, AI800329, H40189, AA041196, AI420048, |
| | | | | | AA127006, AI023081, AA045134, T96696, |
| | | | | | M79132, W23483, BF000996, AI161385, BF476853, |
| | | | | | AI521085, AI984382, AA492294, AA016124, |
| | | | | | N95081, R13864, AI146307, W28330, AI022619, |
| | | | | | T19296, AA410735, BF573582, BF056915, T30952, |
| | | | | | AI971069, AA043329, AA126627, AA215786, R07660, |
| | | | | | BE833878, BE833866, AA329616, BE833882, |
| | | | | | BE833868, AA977851, Z41866, AA226105, AA126801, |
| | | | | | AA056673, AV693019, AA216384, R18560, |
| | | | | | AA041433, AW244035, R05716, AA868767, BF222351, |
| | | | | | H40140, AW589719, AV686312, BF207973, |
| | | | | | AA226035, AA228673, AI817777, AI420271, AV747189, |
| | | | | | AI248289, R05717, T30818, BF847400, |
| | | | | | Z38161, AA879250, D57208, R37006, AA319785, |
| | | | | | AI699205, T96591, AW945698, AA225132, |
| | | | | | AA333327, AA045610, D57177, AA226695, AA045355, |
| | | | | | BE905736, BE670421, AW469919, BF000980, |
| | | | | | AW771589, BF871391, F19153, AW152062, AW964837, |
| | | | | | R41427, BE242459, BF445505, AW373047, |
| | | | | | AW069103, W88670, AA761464, BF844537, AF107834.1, |
| | | | | | AF119386.1, AP003117.2, AF107833.1, |
| | | | | | AP003111.1, AP003112.1, AP003477.2. |
| HRGBL78 | 204 | 910133 | 1-2094 | 15-2108 | BE271199, AW575245, BF794609, BF797900, BE559773, |
| | | | | | BE384088, BE513826, BE270971, BF572042, |
| | | | | | BE560978, BF690655, BE674800, BE275832, BF303959, |
| | | | | | AW205367, AW402801, BF203242, |
| | | | | | AW402242, AW402928, BF305905, BE466652, BE892536, |
| | | | | | AW403946, N24246, AW968460, AI654541, |
| | | | | | N28316, BF572179, N29315, N38941, AW383418, |
| | | | | | AA458944, AI276242, BE729612, AA215300, |
| | | | | | N33010, AW383426, AW383396, N20230, BF692515, |
| | | | | | AI439520, N29316, AA459158, N25452, |
| | | | | | W03476, AW383428, AW402824, N30453, N28949, |
| | | | | | N21241, AI760983, N20533, AI434284, BG025865, |
| | | | | | N72999, N20563, BF896859, AW403434, N67502, |
| | | | | | AI470743, N73074, AA837208, AW407871, H84381, |
| | | | | | AW404443, N26470, W02963, AI864746, N46511, |
| | | | | | W02298, H98912, H84382, N35519, H99497, |
| | | | | | BF890914, AA761778, N71796, AI222330, BC006521.1, |
| | | | | | AL359541.11. |
| HROAJ39 | 205 | 1181699 | 1-1132 | 15-1146 | T66247, BE081925, R34513, F12057, AA852760, |
| | | | | | AA125904, BF996914, BF107281, BF743278, |
| | | | | | BF742834, AB040901.1. |
| HROBD68 | 206 | 827306 | 1-1984 | 15-1998 | AI921101, AW102963, C17730, AW139132, AI499286, |
| | | | | | AU157470, AW157413, AW517766, AI285660, |
| | | | | | AL038713, AU146974, AA779937, AW272376, AI862212, |
| | | | | | AI246569, W58428, AU145383, AI051341, |
| | | | | | AI925647, AI869945, N77920, AI591332, AI440018, |
| | | | | | AU148220, AI872191, AV695638, T06365, |
| | | | | | AI310239, AI559442, AI818151, AA811111, AI453790, |
| | | | | | AA130476, F16040, AI685116, AI610326, |
| | | | | | BE646447, AA166854, AI540098, AI375417, AI887321, |
| | | | | | AA767353, AV693309, N20521, AI369914, |
| | | | | | AA846188, H96719, AA961590, AI088245, AA902828, |
| | | | | | BF112065, AA129986, AI439415, N30146, |
| | | | | | AI817158, N33132, N31608, AW084901, AA055654, |
| | | | | | BE245707, AI619818, AI628308, N20064, |
| | | | | | AV726924, AA347740, AA932087, AA657353, AA550798, |
| | | | | | AI028382, AW262471, AI147839, |
| | | | | | AA132716, AA460715, AI250812, H97388, BG027070, |
| | | | | | AW072619, BF002501, AI568919, Z36956, |
| | | | | | AI538654, N90055, AI376849, AI952804, AI264673, |
| | | | | | AA468571, AA584498, H04879, AA342051, |
| | | | | | AI733728, BF963854, AW962610, AA099788, AI858607, |
| | | | | | AI189033, AA157033, AI675848, AA722562, |
| | | | | | AA659014, AW468555, AA862135, AA911409, AA226507, |
| | | | | | AI244642, N24958, AW085676, |
| | | | | | AA169142, AA364962, AA569918, BF221900, AU156129, |
| | | | | | AV702748, AA016272, AI601265, |
| | | | | | AW272291, AI082077, AI376984, AI377100, AA864823, |
| | | | | | W16525, N26697, AL110383, AW088343, |
| | | | | | BE264670, T48029, T69889, AA724610, W96522, |
| | | | | | AA826143, AW753399, AI827133, AI783731, |
| | | | | | AI598077, AA565911, AL523955, BE677100, BF772474, |
| | | | | | AV695478, BF576607, AU143935, |
| | | | | | AL521095, H20876, W31567, BF805088, R70883, |
| | | | | | AA136630, H01156, AI521525, AA503213, H68343, |
| | | | | | BG152386, AI890971, AC009623.6, AC008173.2, AC084881.19, |
| | | | | | AL161901.18, AC020892.7, |
| | | | | | AC020603.4, AC024341.9, AJ271735.1, AC002486.1, AC013719.8, |
| | | | | | AL109847.5, AL138965.10, |
| | | | | | AL137011.9, AL356962.8, Z99758.7, AC005798.10, AL163202.2, |
| | | | | | AC073200.6, AC004894.1, |
| | | | | | AL451083.5, AC004087.1, AC025040.7, AC015987.5, AL163152.4, |
| | | | | | AL353772.14, AL590043.7, |
| | | | | | AC002527.1, AC009483.3, AB045357.1, AC005885.1, AL360089.13, |
| | | | | | AC067941.7, AL163203.2, |
| | | | | | AL162500.15, AP002532.1, AL355581.14, AC006334.3, AL445383.5, |
| | | | | | AB000882.1, AC021017.4, |
| | | | | | AP003493.1, AC073964.3, AL139109.14, AC010252.3, AC009802.13, |
| | | | | | AC023842.5, AP002797.3, |
| | | | | | AC008109.6, AL050309.4, AL353650.5, AL442183.4, AC006043.1, |
| | | | | | AC010719.4, AF224669.1, |
| | | | | | AC012558.8, AL022153.1, AL121578.1, AC010747.10, AC003091.1, |
| | | | | | AP001691.1, AL049732.11, |
| | | | | | AL583822.6, AC073137.7, AC003051.1, AC009120.8, AC007102.4, |
| | | | | | AL512427.10, AC018616.5, |
| | | | | | AP000949.2, AC018468.4, AL355888.3, AL050329.12, AL035466.3, |
| | | | | | AL139110.17, AC003083.1, |
| | | | | | AC087431.2, AL159152.11, AC007773.1, AC008427.7, AL138703.10, |
| | | | | | AC079631.16, |
| | | | | | AL133370.4, AL109753.9, AL512310.3, AC019041.8, AL160413.7, |
| | | | | | Z82205.1, AC016831.1, |
| | | | | | AP001692.1, AF017104.1, AL157915.3, AL355365.10, AC000112.1, |
| | | | | | AC003012.1, AL392087.7, |
| | | | | | AP000077.1, AC025226.4, AP001683.1, AC006249.1, AC007000.2, |
| | | | | | AC004605.1, AL158158.14, |
| | | | | | AC005668.1, AC022467.7, AC006239.5, Z98304.1, AL359085.14, |
| | | | | | AP000506.1, AC007262.4, |
| | | | | | AC034245.4, AL450305.7, AL356005.9, AL163248.2, AC090527.3, |
| | | | | | AF001549.1, AC008014.5, |
| | | | | | AP001922.4, AC005213.1, AC025471.5, AC006287.1, AL121595.5, |
| | | | | | AC012491.7, AF241726.1, |
| | | | | | AC069543.4, AC022363.24, AF196972.1, AC005562.1, AC022274.5, |
| | | | | | AP002436.3, AC002456.1, |
| | | | | | AC021070.24, AC008774.5, AC019100.4, AC004993.1, AC004848.1, |
| | | | | | AC002541.1, AL513011.7, |
| | | | | | AL163227.2, AL354831.18, AC008444.4, AC026167.4, AC013410.5, |
| | | | | | AC005146.1, AL035552.9, |
| | | | | | Z83850.1, AL139090.11, AP001700.1, AL356269.10, AL136307.12, |
| | | | | | AL390731.9, Z83822.1, |
| | | | | | AC024900.20, AC034240.4, AL354937.12, AC005939.1, Z98754.1, |
| | | | | | AL512449.6, AC005378.2, |
| | | | | | AC021015.4, AC006961.16, AC025920.12, AL163247.2, AC078957.16, |
| | | | | | AC007533.2, |
| | | | | | AP000402.2, AF130343.1, AL009172.1, AC008583.5, AC006370.2, |
| | | | | | AC004066.1, AC009892.5, |
| | | | | | AC018645.4, AC005988.1, AL132985.4, AC005188.1, AL356276.9, |
| | | | | | AC020644.6, AP000742.4, |
| | | | | | AP001686.1, AL133353.6, AL049767.12, AL121868.11, AC015541.21, |
| | | | | | AC005358.1, Z74696.1, |
| | | | | | AL163280.2, AC000115.1, AL589693.3, AC002458.1, AC025887.4, |
| | | | | | AC005406.2, AL358112.20, |
| | | | | | AC026162.5, AL135978.4, AL391221.15, AE000661.1, AC022404.7, |
| | | | | | AL031643.1, AC005951.1, |
| | | | | | AC068139.5, AL138758.7, AC006213.1, AC007163.3, AC011247.10, |
| | | | | | AL512641.9, Z99571.1, |
| | | | | | AC009319.19, AL022308.1, AL049831.2, AL158193.13, U82670.2, |
| | | | | | AC061958.11, AL158038.10, |
| | | | | | AC004740.1, AC084373.24, AL355612.8, AL359197.20, AC015502.6, |
| | | | | | AP001681.1, AL136419.2, |
| | | | | | AC025265.21, AL137145.13, AC021382.6, AC010140.3, AP001674.1, |
| | | | | | AC006994.4, |
| | | | | | AC005593.1, AC006840.17, AC019072.7, AC009961.11, AC026743.4, |
| | | | | | AC006016.2, |
| | | | | | AC068726.5, AL359502.14, Z82216.1, AL035427.17, AC078961.23, |
| | | | | | AL137226.3, AC024084.4, |
| | | | | | AL157698.8, AC021079.4, AF241725.1, AC005901.1, AC010376.5, |
| | | | | | AC011288.4, AC068812.13, |
| | | | | | AC022267.8, AL132800.4, AC021850.8, AF235093.1. |
| HSAWD74 | 207 | 460527 | 1-956 | 15-970 | BG056446, N32720, AW152171, AA339555, AA076697, |
| | | | | | AA525291, AA380007, BE734992, |
| | | | | | AA077031, AA379882, BE047929, AA515728, AI282253, |
| | | | | | AA683069, AW275432, AW274078, |
| | | | | | AA533025, AI675615, AL040054, AA644090, AI345123, |
| | | | | | N42169, AW023111, AV756491, AI962030, |
| | | | | | AV758870, AW021774, AA602906, BG222564, BG222326, |
| | | | | | AV762454, AL048060, AA225406, |
| | | | | | AI879951, AA078830, AW514006, BE063437, BF725844, |
| | | | | | AI591299, AI590522, H68343, AA825827, |
| | | | | | AA559166, AW272294, BF213224, BE049095, AI344810, |
| | | | | | AA714011, AW502237, H63660, H24331, |
| | | | | | AA171400, AL449689, AI753113, F18888, AA282951, |
| | | | | | AV761486, AW193493, AA669238, AI557644, |
| | | | | | AI049868, AW631267, AA525331, AW117740, AA507623, |
| | | | | | AA862183, BE968744, BE677164, |
| | | | | | AW571963, AI433952, BF991881, AA701080, BF970107, |
| | | | | | BF212465, AA832175, AA470933, |
| | | | | | AW157128, AI343144, AW974751, AW338376, AW410409, |
| | | | | | AW844636, AW664505, AA827383, |
| | | | | | AV760014, AI745116, AI003611, AV683406, AW021154, |
| | | | | | AW501278, BE968477, BF991882, |
| | | | | | AI189682, AU124213, AI336637, AW572140, AA610644, |
| | | | | | AW963463, AA708322, AA489390, |
| | | | | | AI887235, AC004084.1, AC004951.5, AP000252.1, AP001711.1, |
| | | | | | AC006160.9, AP000031.1, |
| | | | | | AC022383.3, AC009131.6, AL354864.16, AL121900.26, AP000212.1, |
| | | | | | AP000134.1, AL031281.6, |
| | | | | | Z99716.4, AC009144.5, AC005015.2, AL137852.15, AP001207.3, |
| | | | | | AL035458.35, AP001753.1, |
| | | | | | AC026794.4, AL139022.4, AC009179.17, AL033383.26, AC090498.2, |
| | | | | | AC011472.7, |
| | | | | | AL162578.13, AL590762.1, AL117380.28, AF045555.1, AE006467.1, |
| | | | | | AC006088.1, |
| | | | | | AL096701.14, AL137881.12, AC011491.5, AC018828.3, AC005081.3, |
| | | | | | AC034193.4, |
| | | | | | AL110115.38, AB001523.1, AL023586.1, AL022237.1, AP000348.1, |
| | | | | | U91322.1, AL049591.12, |
| | | | | | AL133367.4, AC018808.4, AC091529.1, AC005666.1, AC011497.6, |
| | | | | | AL450339.5, AC004655.1, |
| | | | | | AP001718.1, AC005052.2, AC026866.8, AL136228.8, AC005793.1, |
| | | | | | AL139317.5, AL354720.14, |
| | | | | | AC004129.1, AL035461.11, AL161727.15, AF217413.1, AC007371.16, |
| | | | | | AL049539.21, |
| | | | | | AL008729.1, AC000353.27, AC003962.1, AC005940.3, AL158830.17, |
| | | | | | AF001549.1, AC004263.1, |
| | | | | | AC006441.13, AP000345.1, AC011811.42, AE006640.1, AL035086.12, |
| | | | | | AC004777.1, |
| | | | | | AC055120.5, AC002430.1, X02571.1, AC009477.4, AC006285.11, |
| | | | | | AC006597.2, AC018663.3, |
| | | | | | AC011479.6, AL139193.4, AC005692.1, AC009220.10, AC005907.1, |
| | | | | | AC007384.3, AC005049.2, |
| | | | | | AC004913.2, AC010328.4, AC005701.1, AC016025.12, U59962.1, |
| | | | | | AP003357.2, AC006345.4, |
| | | | | | AC006241.1, AL356805.5, AC004089.25, AC009247.12, AC005520.2, |
| | | | | | AC004910.1, |
| | | | | | AC027319.5, AC011495.6, AC008126.9, AC008521.5, AC005231.2, |
| | | | | | AC006449.19, AC002554.1, |
| | | | | | AL138720.19, AC011485.6, AL138875.8, AC008747.5, AC002994.2, |
| | | | | | AC003029.2, AC005291.1, |
| | | | | | AC006430.22, AL121712.27, AC078962.30, AL359082.16, AC004647.1, |
| | | | | | AC002429.1, |
| | | | | | AJ277546.2, AL133351.33, AL355102.5, AL391827.18, AL137140.12, |
| | | | | | AC004812.1, |
| | | | | | AC005098.2, AL390878.6, AL512883.5, AC090958.1, AC004883.2, |
| | | | | | AL135924.11, M12901.1, |
| | | | | | AL109984.14, AC018758.2, AL133477.16, AC012170.6, AC026185.3, |
| | | | | | AC005736.1, |
| | | | | | AC090426.1, AF283320.1, AC012499.7, AC011446.6, AC005288.1, |
| | | | | | AC005355.1, AC006581.16, |
| | | | | | AL162430.15, AL133500.3, AL109865.36, AC010271.6, AL445195.4, |
| | | | | | AC005005.1, AC003043.1, |
| | | | | | AL354815.10, AC083884.6, AC008755.6, AL021579.1, AL354935.23, |
| | | | | | Z81364.1, AL109925.11, |
| | | | | | AL139339.22, AC004876.2, AC020983.7, AF195658.1, AL022727.1, |
| | | | | | AC005598.6, Z93930.10, |
| | | | | | AC011480.3, AF312915.1, AC005220.1, AC074121.16, AL139123.14, |
| | | | | | AC010679.6, |
| | | | | | AC027124.4, AL157838.24, AC010205.5, AL049547.10, AJ300188.1, |
| | | | | | AL357972.18, |
| | | | | | AC002350.1, AL356095.11, AL162505.20, AL118502.38, AL022331.1, |
| | | | | | AC021016.4, |
| | | | | | AC008753.8, AC011890.4, AC005409.1, AC005516.1, Z97987.1, |
| | | | | | AC010458.5, AF053356.1, |
| | | | | | AC006111.3, AC007537.3, AC002133.1, AL390026.1, AC002319.1, |
| | | | | | AL137142.20, AP000555.1, |
| | | | | | AC005180.2, AL135838.5, AC024028.10, AL034429.1, AC007055.3, |
| | | | | | AC007298.17, |
| | | | | | AE006639.1, AL078633.32, AC066597.4, AC007766.1, AC010605.4, |
| | | | | | AC025280.4, AC005363.1, |
| | | | | | Z68870.1, AL162503.12, AP000501.1, AL355101.2, AC006208.3, |
| | | | | | AC010422.7, AC008752.6, |
| | | | | | AP000901.5, AC008569.6, AP000346.1, AL031121.5, AC005038.5, |
| | | | | | L78810.1, AC005839.1, |
| | | | | | AC005037.2, AL391374.9, Z83840.7, AC005911.6, AC004840.3, |
| | | | | | AL034402.9, AC005228.1, |
| | | | | | AL035464.20, AL355336.15, AL121920.21, AC025166.7, AC011465.4, |
| | | | | | AC005695.1, |
| | | | | | AL133448.4, AC007003.4. |
| HSDFJ26 | 209 | 834619 | 1-1191 | 15-1205 | AI770009, BE467511, AW593206, AA434584, AI767843, |
| | | | | | AA780308, AA563708, AA317400, |
| | | | | | AA433906, AB021123.1, AC005598.6, AF361936.1. |
| HSDJA15 | 210 | 795252 | 1-1429 | 15-1443 | AW864388, BF680896, BE220848, AI982565, BE967606, |
| | | | | | BE042914, AI215617, AA553540, |
| | | | | | AW864512, AL118801, Z45033, BF949835, Z40201, |
| | | | | | T87220, F09990, H11649, R38421, F07708, |
| | | | | | R55771, R45396, F04558, R41971, AI863613, |
| | | | | | T16890, AW051331, F03377, Z40771, AA188521, |
| | | | | | AI699582, F04949, H97413, AI784055, AW510885, |
| | | | | | AW136105, AW467042, AL046385, AI690813, |
| | | | | | AW080157, BF724894, AI364167, AI288328, AW265004, |
| | | | | | BE907663, AI559752, AL514511, |
| | | | | | AW972273, BF345598, AL514409, BF968666, BF868489, |
| | | | | | BF997967, AI689096, AW827289, AI925164, |
| | | | | | AI922597, BE876976, AI683270, AI342023, AI049669, |
| | | | | | AL513977, AL514359, AI950729, AW198090, |
| | | | | | AI598017, BE538997, BG105381, AI359787, AW194014, |
| | | | | | AI432532, AW087837, AI824357, AI860787, |
| | | | | | AL515413, N25033, AI581139, AI370623, AW972279, |
| | | | | | BG167830, BG033608, AI952306, AL513729, |
| | | | | | AV750565, AI421662, AI568061, AI580027, BE964206, |
| | | | | | AL513913, AI933574, AL514493, AI524179, |
| | | | | | AI610671, AI925281, AI917428, AI499963, BE780955, |
| | | | | | AI628214, AL514721, AI341690, AI224373, |
| | | | | | AI538008, AL514015, AL515171, AI887163, AI932794, |
| | | | | | BE729304, AI872154, AI267454, AI677646, |
| | | | | | AL514357, BF811802, AI635528, AV682250, AI638644, |
| | | | | | AW084896, AI890907, AL514791, |
| | | | | | AW105429, AW081648, AI538850, BG111199, AI583670, |
| | | | | | BE965732, AI345415, AW089844, |
| | | | | | BG029709, BF970652, AW020397, AW268221, AI446704, |
| | | | | | AW263796, AL514455, AW301974, |
| | | | | | AI049923, AI909641, AL513693, AI357902, AL513863, |
| | | | | | AV682403, AI651609, AI612107, AI499570, |
| | | | | | AI471325, AI522052, AI440238, AW020328, AL513865, |
| | | | | | BG114304, AL513713, AV682366, BF037097, |
| | | | | | AI289483, BF751299, AF255922.1, AL109779.1, AL161964.1, |
| | | | | | AK025113.1, AL136825.1, |
| | | | | | AK024992.1, AL133084.1, AF369701.1, AB062978.1, AK000476.1, |
| | | | | | AK026038.1, AF232009.1, |
| | | | | | AL050366.1, AF339775.1, BC007460.1, BC009398.1, AB060884.1, |
| | | | | | AB063074.1, AK000083.1, |
| | | | | | AL162002.1, BC005805.1, BC004899.1, AF155656.1, AF326206.1, |
| | | | | | AF265236.1, BC004925.1, |
| | | | | | BC001967.1, AL359583.1, AC026307.16, BC009294.1, AL122110.1, |
| | | | | | AF002672.1, AK000653.1, |
| | | | | | AP001624.1, BC004292.1, AK027204.1, AL117460.1, AK025258.1, |
| | | | | | AK000718.1, AL389983.1, |
| | | | | | BC003591.1, AK025099.1, AB056421.1, BC001059.1, AK025092.1, |
| | | | | | AB047627.1, AL136805.1, |
| | | | | | AL133559.1, X68560.1, AP001746.1, AL133049.1, BC004349.1, |
| | | | | | BC005094.1, AL050149.1, |
| | | | | | U62966.1, AC002471.5, AC005374.5, BC008282.1, AK024747.1, |
| | | | | | AL133072.1, BC008591.1, |
| | | | | | AK026630.1, AL137533.1, AB060229.1, AC079801.2, BC009285.1, |
| | | | | | AF183393.1, AK025435.1, |
| | | | | | AL133608.1, BC005007.1, AL133088.1, BC007567.1, BC007420.1, |
| | | | | | X99971.1, S71381.1, |
| | | | | | AK027116.1, AF277181.1, BC004202.1, AL117435.1, Z35309.1, |
| | | | | | AK026633.1, AL117587.1, |
| | | | | | AL080154.1, BC005816.1, BC006458.1, BC002733.1, BC008649.1, |
| | | | | | BC001785.1, BC001964.1, |
| | | | | | AK026570.1, AL080150.1, AK025465.1, L10376.1, AL450164.7, |
| | | | | | AL137271.1, AK026885.1, |
| | | | | | BC004513.1, AL122100.1, AK027260.1, BC008387.1, AJ001838.1, |
| | | | | | BC007905.1, AL117626.1, |
| | | | | | AF143723.1, AF141289.1, AF103804.1, BC000100.1, AK024855.1, |
| | | | | | BC001305.1, BC002933.1, |
| | | | | | AL137548.1, AF090934.1, BC008364.1, AF217994.1, BC000090.1, |
| | | | | | S70057.1, AK024978.1, |
| | | | | | BC007796.1, M92439.1, BC003410.1, AK000418.1, BC006091.1, |
| | | | | | AL137560.1, BC008504.1, |
| | | | | | BC004951.1. |
| HSDJM31 | 211 | 491112 | 1-547 | 15-561 | AA426010, AI986451, BE856226, AA773781, AI699994, |
| | | | | | BF477477, BF929123, BF526671, BF341281, |
| | | | | | AW020695, BF929118, BF966870, BF966816, BF966822, |
| | | | | | BF342126, AV726843, AC018616.5. |
| HSDSB09 | 212 | 1301498 | 1-795 | 15-809 | BF432333, AI861851, AI240993, AI795956, AI074484, |
| | | | | | AI640759, AW006868, AW241621, BF592070, |
| | | | | | AW271387, AW614840, AW450466, AW243423, AI244694, |
| | | | | | AI640517, BF431431, BF431530, |
| | | | | | AI439169, AI613108, AI915938, AI984796, AI245393, |
| | | | | | AW300335, AA931466, AW235983, |
| | | | | | AC005722.1. |
| HSHAX21 | 213 | 612823 | 1-1972 | 15-1986 | BE379784, AL522216, AL520172, BF439334, AI652855, |
| | | | | | AI766309, BF512139, AI635715, AW299533, |
| | | | | | AW299897, AI129966, AW411210, AI624534, AI925109, |
| | | | | | AI803484, AI804159, BF184613, AA279212, |
| | | | | | AI609083, AI969459, AI860837, AA879465, AI183591, |
| | | | | | AW104990, AW316983, AW474646, |
| | | | | | AW630619, AI955714, AW409582, AA678827, BE139077, |
| | | | | | AA766602, AI431314, BF087963, |
| | | | | | AA081236, AW194027, BF701425, AI521521, AA588351, |
| | | | | | AI923638, AU155980, N39554, AV686756, |
| | | | | | AA769352, R78080, AW613876, AA259257, R22218, |
| | | | | | AA443811, AA969814, AA729654, R80114, |
| | | | | | T60532, AI969030, AW572611, AA259256, R80005, |
| | | | | | AW805183, BF592136, T51990, BE972627, |
| | | | | | Z38832, R23587, R24524, T52102, AA371263, |
| | | | | | AI564179, AI783565, BF700820, BE619819, AA447188, |
| | | | | | AK001845.1, AL136705.1. |
| HSIDJ81 | 214 | 589447 | 1-1289 | 15-1303 | H27567, H27494, H71543, AI754653, BF857849, |
| | | | | | AW023111, AI521525, AW572721, AW963450, |
| | | | | | AI254770, AI926102, AV701462, AW020150, AI871973, |
| | | | | | AW500534, AW275432, AA218851, |
| | | | | | AA595661, BF854170, BF853574, BF853009, AW151247, |
| | | | | | AA536040, AW274078, AW958962, |
| | | | | | AI791659, AA669238, AI223626, AI249853, AW302048, |
| | | | | | BF725844, AI284543, BE139139, AW855625, |
| | | | | | AL042621, AW575000, AI801505, N68677, AI250552, |
| | | | | | AV758870, AW272294, H86725, AW851405, |
| | | | | | AI625604, AI251034, AA525807, AW075979, AI697235, |
| | | | | | AI090377, AA570255, AA702637, AV760014, |
| | | | | | AA729387, AA831426, AI697239, AI697242, AW504224, |
| | | | | | AI879951, AW502949, H77492, AW514065, |
| | | | | | AI224583, AV759203, BF527070, AA491767, AA229496, |
| | | | | | AL158830.17, AC005412.6, |
| | | | | | AL355855.23, AL132718.5, AL391868.15, AF285442.1, U91321.1, |
| | | | | | AP000505.1, AF129756.1, |
| | | | | | Y14768.1, AB000882.1, AL353804.22, AC005013.1, AC004448.2, |
| | | | | | AL139415.10, AC009309.4, |
| | | | | | AC091529.1, AL391122.9, AC009996.7, AL354836.13, AC010530.7, |
| | | | | | AC005274.1, AC007242.3, |
| | | | | | Z98048.1, AL354861.11, AC006121.1, AC007685.2, AC020552.4, |
| | | | | | AC008126.9, AC090509.1, |
| | | | | | AL096701.14, AC090951.1, AC066597.4, AC068319.4, AC006581.16, |
| | | | | | AC005332.1, |
| | | | | | AL117334.29, AC005200.1, AC024163.2, AC005632.2, AL031447.4, |
| | | | | | AL163279.2, AL355074.5, |
| | | | | | AL121586.31, AL021546.1, AJ295844.1, AC005484.2, AC013717.8, |
| | | | | | AL445196.7, AC007255.4, |
| | | | | | AC008760.6, AL136219.17, AL160274.9, AL031277.1, AL390037.16, |
| | | | | | AL031658.11, |
| | | | | | AC012170.6, AC005102.1, AC026464.6, AF228703.1, AC008068.4, |
| | | | | | AC005921.3, AL121808.4, |
| | | | | | AC004699.1, AC009412.6, AL031311.1, AC007216.2, AB053170.1, |
| | | | | | AL109965.34, AC009488.5, |
| | | | | | AF312915.1, AL132713.11, AL133173.19, AC087225.1, AC022516.4, |
| | | | | | AC009314.4, AC007376.9, |
| | | | | | AL034420.16, AC007850.29, AC005280.3, AL449305.4, AC020913.6, |
| | | | | | AC010326.6, |
| | | | | | AL391259.15, AL512885.4, AC004824.3, AC024168.4, AC009137.6, |
| | | | | | AL023575.1, AC010271.6, |
| | | | | | AC011446.6, AC004000.1, AC090005.1, AL121594.6, AL031726.22, |
| | | | | | AC005180.2, |
| | | | | | AL136305.14, AC006251.3, AL139316.5, AC007262.4, AL109963.4, |
| | | | | | AC012085.4, AP000503.1, |
| | | | | | AC005995.3, AC007041.3, AL121903.13, AL139039.17, AL121973.2, |
| | | | | | AL022326.1, AC073101.7, |
| | | | | | AL359986.15, AC006449.19, AL356257.14, AC019206.4, AL358237.13, |
| | | | | | AL138720.19, |
| | | | | | AC006457.3, AL162458.10, AL034380.26, AP002436.3, AL445143.2, |
| | | | | | AC010223.5, AL157952.8, |
| | | | | | AC007707.13, AL031293.1, AC008641.6, AL357315.14, AC003080.1, |
| | | | | | AL138688.27, |
| | | | | | AL138752.5, Z95115.1, AL158207.15, AC004840.3, Y10196.1, |
| | | | | | AC005859.1, AE006465.1, |
| | | | | | AL356115.9, AC018492.6, AC006455.2, AC018764.6, AL117348.25, |
| | | | | | AL049835.3, AL118520.26, |
| | | | | | AC004491.1, AC005480.3, AC090518.2, AC010618.7, AC005940.3, |
| | | | | | AF111168.2, AP000213.1, |
| | | | | | AC018636.4, AL356299.16, AC091493.1, AL136179.15, AC005257.1, |
| | | | | | AL096791.12, |
| | | | | | AL139113.21, AP000135.1, AL357518.15, AL021808.1, AL133453.3, |
| | | | | | Z93017.6, AL365444.11, |
| | | | | | AL390838.26, AL445669.9, AC008812.7, AL513008.14, AC007537.3, |
| | | | | | AC004447.1, |
| | | | | | AC003029.2, AC026776.4, Z97054.1, AC005399.19, AC010412.7, |
| | | | | | AL133466.22, AL136164.8, |
| | | | | | AC005527.3, AP000031.1, AC010616.5, AC074295.7, AC090532.1, |
| | | | | | AC004846.2, AC018808.4, |
| | | | | | AP001724.1, AC005529.7, AC004551.1, AL353777.18, AC004686.1, |
| | | | | | AC008044.4, AC018663.3, |
| | | | | | AC004873.3, AP001412.2, AL022316.2, AF064858.2, AC008279.3, |
| | | | | | Z94801.1, AC010363.6, |
| | | | | | AL162390.9, AC005070.1, AL078596.8, AL590762.1, AC079177.21, |
| | | | | | AC003101.1, AC004644.1, |
| | | | | | AC006101.3, AC005516.1, AL353798.9, AC002037.1, AL049576.19, |
| | | | | | AC008784.6, AC011455.6, |
| | | | | | AL162584.9, U82828.1, AF134726.1, AC009319.19, AC007541.9, |
| | | | | | AL136295.3, AC013449.8, |
| | | | | | AL132780.5, AL109952.15, AC005081.3, AC007991.7, AF168787.1, |
| | | | | | AL136304.10, AC004789.1, |
| | | | | | AL354808.24, AC027130.5, AP000152.1, AL138958.18, AC020633.3, |
| | | | | | AC004813.2, AC018500.3, |
| | | | | | AC006077.1, AL109956.19, AL139317.5, AC004851.2, AF243527.1. |
| HSJBQ79 | 215 | 1304677 | 1-573 | 15-587 | BE875623, AL520513, BE889141, AW239200, BE874464, |
| | | | | | BE245256, AV723508, BF055054, |
| | | | | | AA232452, AA853047, BE885254, BE185284, BE620276, |
| | | | | | BF772972, BF772971, AW068453, |
| | | | | | AW176526, AL520512, BF772807, BF809972, AF183423.1. |
| HSKDA27 | 216 | 1352409 | 1-4398 | 15-4412 | BF338364, BG253437, BG122685, BF037455, AW303375, |
| | | | | | AW173315, BF037378, BG120262, |
| | | | | | BG117983, BF915045, BF057308, BG252401, BG034853, |
| | | | | | BF793365, AW379378, BF826037, |
| | | | | | AA570507, BF915582, BG122734, W07328, AA600736, |
| | | | | | AI971935, BE697573, BE313814, AI090486, |
| | | | | | AI751258, BE839359, BF447303, AW631492, AA625303, |
| | | | | | BF513067, AI609700, AI768270, AI751257, |
| | | | | | BE939504, AA417652, AI751036, BE378218, AI652363, |
| | | | | | AI971415, AA599207, AI371013, AA024968, |
| | | | | | AI147536, W55850, AA063585, AW794702, AA446024, |
| | | | | | BE889110, AI828437, AI862133, AA421744, |
| | | | | | AI272646, AI148235, AA419609, AW005418, AA634323, |
| | | | | | BF883408, BF378271, AA416767, |
| | | | | | AA258414, AW305114, AI083516, AI752526, AW024492, |
| | | | | | AI698032, AW957682, AI092202, AI191710, |
| | | | | | C05155, AA419525, AI218226, AI754332, AW794499, |
| | | | | | AA410929, AI936116, AI079893, BE272411, |
| | | | | | AA593295, AA455497, AI039656, BG035195, AA747741, |
| | | | | | AA774270, AA364833, AI350380, |
| | | | | | BF940413, T59268, BF197746, AI084698, AW800540, |
| | | | | | AA834031, AI673545, AW795817, AA978105, |
| | | | | | AA622501, AA032249, AA912802, AI432010, N66832, |
| | | | | | AI751035, AI754989, AI082183, BE178218, |
| | | | | | AI751086, N75819, N67061, AA971661, AA873147, |
| | | | | | AA478719, AA036654, T59227, AI538117, |
| | | | | | AA662437, BE765721, T66232, AI751085, AW674273, |
| | | | | | AA024662, BF197986, AI564218, AA319726, |
| | | | | | AA657729, N64555, AA852211, C03119, AI221431, |
| | | | | | AA455496, AA033678, C04206, AI520867, |
| | | | | | AA258397, AW867914, AW867908, AA382381, N24008, |
| | | | | | AA456579, AA936765, AI433202, |
| | | | | | AA446297, AW338252, BF940540, AI075349, D31528, |
| | | | | | BE839377, AI537292, AA382234, AI446798, |
| | | | | | BE839418, AA459088, BF724219, BE839363, BE773013, |
| | | | | | AI064722, AW375493, AW375513, |
| | | | | | AW375482, AW375483, AW375502, AW370152, AW134700, |
| | | | | | BF352435, AW375514, F12285, |
| | | | | | BE772982, AW797394, BE839409, BE710069, AA299257, |
| | | | | | AI061637, BE773049, AW375497, H63649, |
| | | | | | AW805832, H29954, AI587210, AW836298, BE773047, |
| | | | | | H75893, BF985423, BF089372, AA610296, |
| | | | | | T73259, D30912, BE839372, BE934501, AW937287, |
| | | | | | AL531501, AI270416, AW376140, AW838930, |
| | | | | | AI886158, AA375571, AL134647, H94943, BG006581, |
| | | | | | AW964941, AA336003, AA410897, R94988, |
| | | | | | W47433, R64321, D31541, W39467, AV693669, |
| | | | | | T82080, W04350, AA384793, AW572523, BE693478, |
| | | | | | AW375499, BF569459, AA428478, BF001215, H43934, |
| | | | | | AA382233, Z20767, AA382380, BE157468, |
| | | | | | W16893, BE066790, AW384231, BE157596, H80974, |
| | | | | | R96403, BE814079, AA345211, BG153436, |
| | | | | | AV654605, BE157507, AW292030, H62182, AW384236, |
| | | | | | AI382511, BF674009, AA335755, H25902, |
| | | | | | W65400, BG169442, AV710284, T64640, AA994712, |
| | | | | | BF944442, BF725435, BF726055, BF917617, |
| | | | | | W67868, H71581, AA326037, M14036.1, X07577.1, |
| | | | | | M13690.1, M13656.1, M13203.1, X54486.1, |
| | | | | | X07432.1, AB062098.1, X07431.1, AB062097.1, AB062096.1. |
| HSKGN81 | 217 | 676075 | 1-1893 | 15-1907 | BG110811, BE745101, BE743722, BE545826, BE745120, |
| | | | | | BF681303, AW978606, AV702796, |
| | | | | | BE047756, BF848815, AW961578, AA446896, AI422823, |
| | | | | | BF848816, AI911304, AI038608, AA312710, |
| | | | | | AI143843, AI150244, BF829479, AI193547, AA705005, |
| | | | | | AI268239, AI140112, T65948, BE547522, |
| | | | | | AA393113, AI366477, AI085862, AI074853, AI277116, |
| | | | | | AI983894, AA394060, AA643650, AA100891, |
| | | | | | BF819277, AA922511, AV762171, AA478086, AI689302, |
| | | | | | AI275103, AI359079, AA532473, AV729423, |
| | | | | | BE349933, AI287604, AA477628, AV704180, BF847512, |
| | | | | | AI921910, AW105712, AW370596, |
| | | | | | AI624549, AW149890, AA505962, AA321215, AI357856, |
| | | | | | AA292337, BE292730, T34097, AW439882, |
| | | | | | AA447016, AI914726, R42595, AI858704, AI446219, |
| | | | | | AI275944, Z43230, BE707350, AW194214, |
| | | | | | AA135290, AW378090, BE241555, BE243232, AA010669, |
| | | | | | AW953547, AA632244, AW662488, |
| | | | | | BG057144, AW068278, R12726, BE151809, AW674205, |
| | | | | | T74373, N78860, BE242323, T31535, |
| | | | | | AI689506, R27706, F09665, R17501, AA435604, |
| | | | | | AW572245, BE548954, AI023355, BE545268, |
| | | | | | Z41318, AA383547, AA454729, AA570630, AA031630, |
| | | | | | AW173762, AW840945, AA381001, |
| | | | | | AA234325, T35951, Z45645, BE242712, T35949, |
| | | | | | AI866536, AA381111, AA693741, D82426, U83555, |
| | | | | | BE243322, F12018, AW793087, D82527, T64523, |
| | | | | | AW130852, AW262657, AA090647, AA359844, |
| | | | | | T19865, AA082483, U52870, R39778, W17267, |
| | | | | | AW603488, AA858156, AW068025, AW801618, |
| | | | | | BE242609, R05679, BE672790. |
| HSKNB56 | 218 | 548077 | 1-1320 | 15-1334 | AV715380, AV705910, BG170454, AW300598, AW996981, |
| | | | | | AA669095, AA278335, AI797687, |
| | | | | | AI948608, AA464762, AW996774, BF036901, AI718165, |
| | | | | | AI129358, AA504439, AI765613, AA114888, |
| | | | | | BE702298, AA521311, AA114887, AW298550, AA504203, |
| | | | | | AA810071, AI051218, AI299255, |
| | | | | | AA804200, AI701050, AI694270, AI631949, AA974370, |
| | | | | | BF434357, AI890342, AA256836, AI129632, |
| | | | | | AI023212, BE709212, AI935316, BE702132, AV726168, |
| | | | | | BE702036, AA252310, AA831496, AA662808, |
| | | | | | BE169470, AA464174, D57415, AA705444, BE702013, |
| | | | | | AA280044, Z44155, AW902156, BE702163, |
| | | | | | T71333, Z25261, BE702070, D54675, AA165321, |
| | | | | | W46279, AI420451, N69756, BE702230, T71487, |
| | | | | | AA832206, AA973497, AA521314, BF109037, AA877638, |
| | | | | | AW196653, AI027401, AA255623, |
| | | | | | AA863081, AI807828, AI831132, AA995204, AA252340, |
| | | | | | Z28882, W46278, Z40146, BG249572, |
| | | | | | D57019, BE549886, N87679, T84473, AA452985, |
| | | | | | Z19443, AI918466, AV651701, F00129, AV651262, |
| | | | | | BE841213, D56990, AI351209, BE813969, AW369458, |
| | | | | | AA743770, AL047888, AL047889, AW997000, |
| | | | | | BF840712, AW582764, AW963201, AW339489, AC002350.1. |
| HSNAD72 | 219 | 467397 | 1-847 | 15-861 | AW971203, AW861646, AI610321, AI880774, AA829195, |
| | | | | | AI880765, AA551170, AI969833, |
| | | | | | AA133550, T61620, AV758870, AA557945, AW873417, |
| | | | | | AI635819, C06160, AV761107, BE268727, |
| | | | | | AA743968, AA845333, BF574331, BG222875, BF946125, |
| | | | | | BF882222, BE068993, BF946124, |
| | | | | | AA493841, AW169469, AI251576, AI821901, BE044000, |
| | | | | | AI701898, H86399, H47461, AI338426, |
| | | | | | AI926093, AC009086.5, AC003007.1, AF001549.1, AC004638.1, |
| | | | | | AC018868.4, AC008747.5, |
| | | | | | AC090527.3, AL050318.13, AC078846.2, AC006254.10, AL035462.21, |
| | | | | | AL355476.12, |
| | | | | | AC026431.3, AC087091.1, AC005245.1, AL031311.1, AL136981.22, |
| | | | | | AL391241.21, |
| | | | | | AC010422.7, AC010267.6, AC011609.9, AC006538.1, AC006483.3, |
| | | | | | AL353807.18, AL049776.3, |
| | | | | | Z98200.8, AC067722.21, AC010913.9, AC008622.5, AC018828.3, |
| | | | | | AL080317.11, AC005484.2, |
| | | | | | AC022383.3, Z97989.1, AL117258.4, AC004531.1, AL121594.6, |
| | | | | | AL161656.20, AL122020.5, |
| | | | | | AL157372.18, AC067742.5, AL021453.1, AL390074.17, U47924.1, |
| | | | | | AC005077.5, AC002404.1, |
| | | | | | AC008482.5, AL035404.20, AL136124.10, AC005519.3, AL359983.7, |
| | | | | | AC005932.1, Z74739.1, |
| | | | | | AL034402.9, AC004813.2, AL136304.10, AC007386.3, AC022392.4, |
| | | | | | AL136979.16, |
| | | | | | AL031660.16, Z83844.5, AP000279.1, AC004975.2, AC011462.4, |
| | | | | | AL139809.16, AL450226.1, |
| | | | | | AC007193.1, AC008812.7, AC025588.1, AL445212.9, AL121890.34, |
| | | | | | AC011497.6, AC008752.6, |
| | | | | | AP000688.1, AC007216.2, AL356915.19, AP000106.1, AF207550.1, |
| | | | | | AC016742.10, AC005620.1, |
| | | | | | AC022384.4, U95742.1, AC004000.1, AL117381.32, AC011479.6, |
| | | | | | AC007285.3, AC008484.5, |
| | | | | | AC005755.1, AL157838.24, AC023790.21, AL162724.16, AC011487.5, |
| | | | | | AC000353.27, |
| | | | | | AL137077.31, AL031733.3, AL445490.6, AC025165.27, AC018711.4, |
| | | | | | AL354707.17, |
| | | | | | AC006251.3, AP000038.1, AL590763.1, AF129756.1, AP002852.3, |
| | | | | | AC005602.1, AC010170.3, |
| | | | | | AC005041.2, AL050302.2, AC005821.1, AC004846.2, AC003041.1, |
| | | | | | AL133238.3, AL031575.1, |
| | | | | | AC005257.1, AL137918.4, AC007163.3, AP000555.1, AL135905.6, |
| | | | | | AC020915.6, AP000047.1, |
| | | | | | AC025280.4, AL117330.6, AL135927.14, AC007227.3, AL049868.20, |
| | | | | | AL133367.4, AC007686.5, |
| | | | | | AC005365.1, AC006511.5, AL163203.2, AC020928.6, AC007298.17, |
| | | | | | AC009756.9, AC005666.1, |
| | | | | | AL359091.10, AC006515.7, AL139353.3, AL136170.12, AC009238.4, |
| | | | | | AL353804.22, U91323.1, |
| | | | | | AL160236.4, AL450224.1, AL159997.14, AP001724.1, AC006452.4, |
| | | | | | AL158830.17, AC004812.1, |
| | | | | | AC007751.3, AC004675.1, AL080243.21, AJ246003.1, AL354932.26, |
| | | | | | AC009488.5, |
| | | | | | AL391987.15, AP000213.1, AL354935.23, AL158813.16, AP000744.4, |
| | | | | | AC002543.1, |
| | | | | | AC010271.6, AL138878.10, AP000558.1, AC009144.5, AL020997.1, |
| | | | | | AC004913.2, AC008392.6, |
| | | | | | AL133246.2, AL161436.12, AC073073.2, AC012306.11, AC020914.7, |
| | | | | | AC090942.1, U52112.1, |
| | | | | | AL110115.38, AC004491.1, Z96074.4, AP000135.1, AC005410.2, |
| | | | | | AJ009616.3, AF165926.2, |
| | | | | | AL121886.22, AL109628.5, AL109743.4, AC008760.6, AL078477.5, |
| | | | | | AC004534.1, AL357052.15, |
| | | | | | AC006077.1, AC008745.6, Z98752.16, AP000692.1, AC009077.7, |
| | | | | | AP000031.1, Y18000.1, |
| | | | | | Z98051.6, AC002418.1, AC008687.4, AC005920.1, AC004234.1, |
| | | | | | AC012476.8, AL513043.7, |
| | | | | | L44140.1, AL136305.14, AC010605.4, AL022323.7, AC004825.2, |
| | | | | | AC013436.5, AL138752.5, |
| | | | | | AL132712.4, AL359092.14, AC018758.2, AC011510.7, AC004659.1, |
| | | | | | AC007597.3, |
| | | | | | AL353602.10, AL136039.4, AC008521.5, AL390738.4, AC020931.5. |
| HSQFP66 | 221 | 460537 | 1-463 | 15-477 | BE465277, BF593260, AI765036, BE181153, BE181155, |
| | | | | | AA834498, BF365438. |
| HSRFZ57 | 222 | 892171 | 1-1916 | 15-1930 | AC006159.3, AF125348.1, AC084730.2. |
| HSUBW09 | 223 | 413246 | 1-1007 | 15-1021 | AI991103, AI765351, AA703513, BF939824, AI925701, |
| | | | | | AW295389, AW976578, AI199421, AI422698, |
| | | | | | AI934983, BE501421, AI127932, AA703493, AW297092, |
| | | | | | AA677025, AA848037, AA814098, |
| | | | | | AW404152, AW904298, AW182186, AW197850, AA741121, |
| | | | | | AA651794, AI678148, AA906044, |
| | | | | | F18680, AA743764, AI632270, AW590435, BE045258, |
| | | | | | AA608892. |
| HSVBU91 | 224 | 596868 | 1-713 | 15-727 | AW839808, AA077633, BF919965, AC008171.3, AF041056.1, |
| | | | | | AC004089.25, AC005081.3, |
| | | | | | AC005015.2, AB006629.2. |
| HSXGI47 | 225 | 886200 | 1-1242 | 15-1256 | AV760760, AW968156, AA737309, BE888245, AA640430, |
| | | | | | AA167792, AL163279.2, AC019205.4, |
| | | | | | AC027319.5, AC011811.42, AL449363.12, AC011445.6, AC020916.7, |
| | | | | | AC003663.1, |
| | | | | | AL162615.13, AL121886.22, AC005412.6, AL096840.25, AC007404.4, |
| | | | | | AL035704.9, |
| | | | | | AP001717.1, AC005098.2, AL356915.19, AC003029.2, AE000658.1, |
| | | | | | AC007739.2, AC010359.5, |
| | | | | | AC004867.5, AL022476.2, AC083884.6, AC005512.1, AC009079.4, |
| | | | | | AC004965.2, AC005932.1, |
| | | | | | AL031670.6, AC022217.5, AP002852.3, AC010605.4, AP001725.1, |
| | | | | | AC011489.6, AC008736.6, |
| | | | | | AC005519.3, AC009123.6, AL590762.1, AC004983.2, AL049776.3, |
| | | | | | AL138756.23, |
| | | | | | AC004166.12, AC008744.6, AC008474.7, AC005011.2, AC008812.7, |
| | | | | | AC011005.7, |
| | | | | | AL034420.16, AL137792.11, AC074121.16, AC016643.6, AL355392.7, |
| | | | | | AL121594.6, |
| | | | | | AC005089.2, AC020913.6, AL022721.1, AL449305.4, AL109827.8, |
| | | | | | AC006023.2, AC018720.5, |
| | | | | | AL035685.21, AL021155.1, AC010102.3, AC007731.14, AC079468.3, |
| | | | | | AL008730.1, AP001724.1, |
| | | | | | AC005666.1, AL391803.14, AC005736.1, AC020908.6, U91323.1, |
| | | | | | AL121845.20, AC005000.2, |
| | | | | | AC008745.6, AC008537.5, AL031005.1, AC026464.6, AL031727.42, |
| | | | | | AC011446.6, AC027644.9, |
| | | | | | AC008555.5, AC004821.3, AL031311.1, AF001548.1, AC009220.10, |
| | | | | | AC005280.3, AC016637.6, |
| | | | | | AP001716.1, AC011491.5, AC004491.1, AL022328.21, AC090947.1, |
| | | | | | AL135749.3, AC006141.2, |
| | | | | | AL354760.11, AL035659.22, AC027126.4, AC005102.1, AC020663.1, |
| | | | | | AL022323.7, |
| | | | | | AL050318.13, AL022322.1, AC008379.6, AC009155.3, AC011485.6, |
| | | | | | AC016644.7, AC008895.7, |
| | | | | | AC000353.27, AC005484.2, AC005274.1, AF053356.1, AL135927.14, |
| | | | | | AC007227.3, |
| | | | | | AC005500.2, AC008521.5, AC009144.5, AC007318.4, AC005288.1, |
| | | | | | AL161670.4, AC011461.4, |
| | | | | | AL133367.4, AC010320.9, AL022315.1, AC005800.1, AC002418.1, |
| | | | | | AC006101.3, AL391259.15, |
| | | | | | Z93023.1, AC006014.2, AC002350.1, AC009570.13, AD000092.1, |
| | | | | | AC007003.4, AC009131.6, |
| | | | | | AC018828.3, AC004929.2, AL138724.12, AL079342.17, Z99716.4, |
| | | | | | AC002425.1, AL121992.24, |
| | | | | | AL096791.12, AL049874.3, AL049759.10, AC005527.3, AC004883.2, |
| | | | | | AC018711.4, |
| | | | | | AL118520.26, AL121653.2, AC025593.5, AC006452.4, AL050335.32, |
| | | | | | AL139317.5, |
| | | | | | AL117348.25, AC006441.13, AL390252.9, AC019206.4, AC007151.2, |
| | | | | | AC010530.7, Y14768.1, |
| | | | | | AP000113.1, AP001709.1, Z93015.9, AC000003.1, Z84466.1, |
| | | | | | AC006329.5, AC004841.2, |
| | | | | | AC002312.1, AC018638.5, AC006345.4, AC002565.1, Z83844.5, |
| | | | | | AL451075.15, AC007374.6, |
| | | | | | AC005821.1, AL356481.16, AC004967.3, AC005071.2, AC009412.6, |
| | | | | | AL139113.21, |
| | | | | | AC011247.10, AP000505.1, AL121819.6, AL033529.25, AC008738.6, |
| | | | | | AC003070.1, AC018809.4, |
| | | | | | Z93017.6, AF317635.1, AF196779.1, AC074013.5, AF129756.1, |
| | | | | | AC009120.8, AC008547.5, |
| | | | | | AC009086.5, AL034429.1, AL158830.17, AL353777.18, AC008481.7, |
| | | | | | AP003439.2, AP001748.1, |
| | | | | | Z95116.1, AC005057.2, AE006639.1, AC009309.4, AL355312.24, |
| | | | | | AC004951.5, AC009137.6, |
| | | | | | AL020997.1, AL049569.13, AL158206.8, AC026765.22, AL133174.15, |
| | | | | | AL445686.14, |
| | | | | | AP002348.3, AL160165.17, AC016526.6, AC068533.7. |
| HSYAZ63 | 226 | 1177537 | 1-3452 | 15-3466 | AV722966, BE388876, AV760983, AV762946, BF185935, |
| | | | | | AV762161, BF108823, AV759946, |
| | | | | | AV761323, BF064074, BF689470, BF001385, AI970338, |
| | | | | | AL046433, AI348109, BE349503, AI819289, |
| | | | | | AI090048, AW305162, AI857825, AA551911, AI963412, |
| | | | | | BF690404, N90883, AI652494, BG055077, |
| | | | | | AA311166, BE502539, AI200346, AA158746, AA502649, |
| | | | | | AW083258, BE551410, AV763075, W04340, |
| | | | | | AA150467, F29360, BF436259, AA040295, F21409, |
| | | | | | BF344822, R86673, AW206720, AI961780, |
| | | | | | W79500, AI831018, AA514281, AA609867, T67539, |
| | | | | | W79599, F25102, AA807108, AI351521, F36686, |
| | | | | | BE164504, AA056972, BF917215, F24355, W16820, |
| | | | | | AA513661, F30483, AI349360, AI805040, |
| | | | | | AA532766, AW590360, AI962009, AI817647, BE140360, |
| | | | | | AI720757, BG236085, T64334, AI400242, |
| | | | | | AI832241, R86847, BF741663, AI383420, N74174, |
| | | | | | T65686, N92928, AA584402, AW138172, |
| | | | | | AA297326, BE170117, AA359080, AL515041, AL515035, |
| | | | | | AL513867, AL515375, AL040243, |
| | | | | | AL513907, AL514303, AI540832, BE905408, AI433976, |
| | | | | | BG179993, BF883916, BG260037, AV681987, |
| | | | | | AW274192, BG257535, BG036520, BF793644, AL135661, |
| | | | | | BE048026, BF525438, AV657079, |
| | | | | | AI475371, BF037097, BG031815, BE964812, BG108147, |
| | | | | | AV715263, AL121270, AI702406, AI687728, |
| | | | | | AI863014, AL513911, AI439087, BE887488, BF340104, |
| | | | | | AV755678, BF812933, AL046849, BE048071, |
| | | | | | AV655645, AW071417, AI440239, BG036846, AL514627, |
| | | | | | BE876033, BG032208, AI224992, AI250293, |
| | | | | | AI497733, BE904178, BE877769, AL513553, BE047952, |
| | | | | | AI433157, BF968041, AL513597, AI064830, |
| | | | | | BE018334, AV757705, AV705644, AI802542, BE881061, |
| | | | | | AI349772, AV681638, AV755581, |
| | | | | | AW071349, AI349933, BF344507, BE047863, AL045500, |
| | | | | | AI499393, AI758437, AI521012, BE781369, |
| | | | | | AL513803, AW195957, AI613017, AL036146, AI678302, |
| | | | | | AI568870, AI499463, AI249257, AW301409, |
| | | | | | AW103371, BF724691, AL513753, BG180996, AL514919, |
| | | | | | AI702433, AL513837, AV681630, |
| | | | | | AL047763, AV682252, AV758110, BF792469, AI868831, |
| | | | | | AI275175, BF969494, AI635461, AI498579, |
| | | | | | AI625079, AL036802, BF795712, AL515173, BE048135, |
| | | | | | BF791952, AW827203, AI538716, AL513693, |
| | | | | | AI285735, AW268253, BE785905, AW827249, AI564719, |
| | | | | | BE963035, BF971016, BG109270, AI620284, |
| | | | | | BE048081, BE964700, AI866608, BG168696, AV729334, |
| | | | | | AL119791, AV756560, BG252929, |
| | | | | | BG105099, BF968493, BE172767, AW117882, AV681951, |
| | | | | | BF726001, AV682249, BE777769, |
| | | | | | BG164371, AL513905, AV682266, AW238730, AL048871, |
| | | | | | AV682479, AV757455, AI800453, |
| | | | | | AI800433, BG058208, AV682264, AI934036, AI633419, |
| | | | | | AV757737, BE966388, AI866002, AI499131, |
| | | | | | AV681618, BG151247, AW169653, AW074993, AI612913, |
| | | | | | AI349645, AL121365, AV757853, |
| | | | | | AI349004, AV755613, AL514129, AW162071, BF970446, |
| | | | | | AF113615.1, AC040160.4, AK025992.1, |
| | | | | | U23861.1, AF090901.1, AF090900.1, AF090934.1, AL157431.1, |
| | | | | | AL136892.1, AL442082.1, |
| | | | | | AL110221.1, BC008365.1, AL117457.1, AL136586.1, AL133075.1, |
| | | | | | AL136787.1, BC008387.1, |
| | | | | | AB056420.1, AB055303.1, S78214.1, BC007021.1, AL050393.1, |
| | | | | | AL389978.1, BC008488.1, |
| | | | | | AL050116.1, AL512733.1, AL080060.1, AF090903.1, AL442072.1, |
| | | | | | AL133640.1, BC008417.1, |
| | | | | | AF104032.1, AF078844.1, AL110196.1, AL390167.1, AL117460.1, |
| | | | | | AF125949.1, AL137527.1, |
| | | | | | AK026608.1, AL133016.1, BC003687.1, AL050149.1, AL162083.1, |
| | | | | | AF090943.1, AB048953.1, |
| | | | | | BC003683.1, AL049452.1, AF218014.1, AB049758.1, AL359596.1, |
| | | | | | AK026865.1, AJ242859.1, |
| | | | | | AL359601.1, AL133606.1, AB048964.1, AF111847.1, AK026784.1, |
| | | | | | AK026741.1, AB060916.1, |
| | | | | | AL050146.1, AK000212.1, AK025339.1, AL136749.1, AB056768.1, |
| | | | | | AL049938.1, AL136789.1, |
| | | | | | AB063046.1, AB055361.1, AF106862.1, AF090896.1, AB060887.1, |
| | | | | | AL050108.1, AB047615.1, |
| | | | | | AB063008.1, U42766.1, AK026045.1, AB056809.1, BC006807.1, |
| | | | | | AL122050.1, AB019565.1, |
| | | | | | AL133258.16, AB063070.1, AK025958.1, AB047801.1, BC001967.1, |
| | | | | | AL162006.1, AL136799.1, |
| | | | | | AK025084.1, AL133557.1, AL049466.1, AL049314.1, AL080137.1, |
| | | | | | AL359615.1, AK027868.1, |
| | | | | | AF219137.1, AL122093.1, AL136844.1, AL389982.1, AK026855.1, |
| | | | | | AL080124.1, AL512746.1, |
| | | | | | AL137283.1, AB060863.1, AB050510.1, AK026744.1, AL050277.1, |
| | | | | | AB060912.1, AL096744.1, |
| | | | | | AL133080.1, AL133093.1, AK025772.1, Y16645.1, AL137557.1, |
| | | | | | AB060908.1, AL122123.1, |
| | | | | | AL136768.1, AL050138.1, AL133565.1, AL122121.1, AK027096.1, |
| | | | | | AK026592.1, BC002733.1, |
| | | | | | AL137459.1, AF146568.1, AK026533.1, AK000618.1, AL359618.1, |
| | | | | | AF207829.1, BC008280.1, |
| | | | | | AL049382.1, AF125948.1, AK000137.1, AL353940.1, AK000083.1, |
| | | | | | AL512718.1, AL049430.1, |
| | | | | | AF271350.1, AL117394.1, AF091084.1, AK000445.1, AL137550.1, |
| | | | | | AL359941.1, AL512754.1, |
| | | | | | AK025092.1, AB062938.1, AK026452.1, X82434.1, U91329.1, |
| | | | | | AC007375.6, AK026583.1, |
| | | | | | BC008485.1, AL133344.28, AL110225.1, AB048954.1, AB060826.1, |
| | | | | | BC004556.1, AK000614.1, |
| | | | | | AF097996.1, BC006195.1, AL512719.1, AK025491.1, AK000652.1, |
| | | | | | AK026627.1, BC001045.1, |
| | | | | | AB055368.1, AB060825.1, AB051158.1, AF183393.1, AK026647.1, |
| | | | | | AB055315.1, AB060852.1, |
| | | | | | AK026542.1, AK026534.1, AK026480.1, AK024538.1, AL117435.1, |
| | | | | | AF225424.1, AL353745.7, |
| | | | | | AC026464.6, AB055366.1, AL117585.1, AB052191.1, AL117583.1, |
| | | | | | AB047904.1, BC002839.1, |
| | | | | | AL133560.1, AK026504.1, AK026959.1, AF177336.1, AP001346.1, |
| | | | | | AL512765.1, AC084881.19, |
| | | | | | AK026532.1, AK027113.1, AK000432.1, S61953.1, BC008983.1, |
| | | | | | AL136928.1, AB052200.1, |
| | | | | | AC009364.8, AL049464.1, AL158191.17, AL049300.1, AK000323.1, |
| | | | | | AK026353.1, AK026927.1, |
| | | | | | AC018643.3, AL050024.1, AL512883.5, AB056421.1, AK025414.1, |
| | | | | | AL512689.1, AP001666.1, |
| | | | | | AL512684.1, AB048974.1, BC007199.1, AL122110.1, BC008899.1, |
| | | | | | AL136845.1, AK025391.1, |
| | | | | | BC008070.1, AK026086.1, AK025967.1, AL353594.13, Z82022.1, |
| | | | | | BC004951.1, AK026528.1, |
| | | | | | AB049892.1, AK027204.1, AL353625.5, AK000718.1, AL355795.13, |
| | | | | | AL359583.1, AK027164.1, |
| | | | | | AL122098.1, AI889193. |
| HSYBG37 | 227 | 1056317 | 1-1224 | 15-1238 | BE898532, BF034673, BF337228, BF528632, BE857436, |
| | | | | | BE732588, BF527968, BE888983, BG033426, |
| | | | | | AW372231, AA156935, BF915018, AV690944, AI140769, |
| | | | | | AW068552, AI818102, AI870885, |
| | | | | | AA135715, AA928421, AL047844, AI927908, AI762549, |
| | | | | | AL047845, AI797790, AI005050, AA917939, |
| | | | | | AW873600, AI453114, AI420740, AW466885, AI432328, |
| | | | | | AI138677, AW188156, AW873561, |
| | | | | | BF980675, AW058508, BF770293, AA628898, AI094804, |
| | | | | | AI056500, BF820729, AI375863, BE857274, |
| | | | | | AW959629, AA905637, AI382011, AI860596, AA877674, |
| | | | | | AA513392, AI459017, W73121, AI242677, |
| | | | | | AI309547, BF819613, H16241, T70036, AA642494, |
| | | | | | AI675842, T03552, AI689235, BF919604, |
| | | | | | AI274910, AV748307, C00014, AI678921, AA993626, |
| | | | | | AI201747, AA742201, BF351125, BF770277, |
| | | | | | AW082362, BF914643, T30150, AI014513, R93245, |
| | | | | | H83130, AI538135, AI244946, AI952326, N45499, |
| | | | | | BF344569, AI685761, H05737, F20400, BF914807, |
| | | | | | AI094715, AI810996, AA320821, BF222389, |
| | | | | | H20376, H20185, H83129, T10108, AA370998, |
| | | | | | H12111, T70103, BF919644, AI800313, R47434, |
| | | | | | AI557606, AA299558, BF983106, BF347892, N47608, |
| | | | | | BF590090, AI141309, BF915129, AW385116, |
| | | | | | AA885897, BF917925, BF917920, N89795, AI797519, |
| | | | | | AA652696, AI193489, AA894705, T10109, |
| | | | | | AW189222, BF350004, BE829911, AI224610, AI423668, |
| | | | | | AA872954, AI207820, R39978, AI989675, |
| | | | | | AI439989, AI640906, BE046990, AI206927, AA136304, |
| | | | | | AW614497, AI751243, AA128437, AW772433, |
| | | | | | AI640184, AW385115, BF326281, W39052, AA595730, |
| | | | | | BF088390, AA731862, BF338332, BF111399, |
| | | | | | BF770143, BE767158, AA983866, AF302786.1, AE006467.1, |
| | | | | | AL031709.12, AK024842.1. |
| HTADW91 | 228 | 844835 | 1-1467 | 15-1481 | AL524277, AL525820, BE382621, BE906048, BE313348, |
| | | | | | BF311240, BF125870, BE314074, BE262971, |
| | | | | | BE261842, AW957565, AA434527, AI679032, AA429042, |
| | | | | | BF530443, AI269591, BF568093, AI751352, |
| | | | | | BF087452, AI926385, AW957563, AA427824, BF829853, |
| | | | | | BF207056, AI307680, AW751395, R73343, |
| | | | | | AA358983, AA985603, BF206540, BG029042, AA378137, |
| | | | | | AW016282, AA904900, BE767196, |
| | | | | | BE049123, AI538331, AI498177, AW084403, AW085619, |
| | | | | | AA428054, AW081391, AA461497, |
| | | | | | AW439261, AI081131, AI764997, BE672411, AW057677, |
| | | | | | AA761398, BE221467, AW080458, |
| | | | | | AI244183, AI634014, AW193005, AW339212, AW516122, |
| | | | | | AW027659, AW067803, AI954056, |
| | | | | | AW571944, AI633339, AA772395, AI916888, AI683203, |
| | | | | | AI422341, AW025425, BE671235, AI147736, |
| | | | | | AI090554, AI380245, AW439080, AI282915, BF196022, |
| | | | | | AA351024, AI565421, AI089315, BE501181, |
| | | | | | BF476178, AI205166, AW270733, AI751353, AA135896, |
| | | | | | AI936764, AW024598, AI767080, AI016528, |
| | | | | | AA135895, AV707105, AA620766, R10091, T49864, |
| | | | | | BF920348, T97167, AI831497, AA399634, |
| | | | | | AA152389, AA865196, AI277342, R50357, AW081268, |
| | | | | | BE503733, R11029, AA617807, R11077, |
| | | | | | AA649308, R10190, BF589988, R53497, N50819, |
| | | | | | R77618, AA568975, AA399595, AL525780, R72870, |
| | | | | | W68569, AA351025, R71797, AA912795, R79394, |
| | | | | | AW768731, BF903645, AA894462, H13235, |
| | | | | | H24510, BE811970, BF568932, H30448, AA627105, |
| | | | | | BF206286, BF340605, AW067872, BC008853.1, |
| | | | | | AL133581.1. |
| HTAEE28 | 229 | 1018291 | 1-1327 | 15-1341 | AW195720, AI765273, AI817356, AI928166, AI283845, |
| | | | | | BE503396, AW081502, BE349083, BF059350, |
| | | | | | AA419437, AA758800, AW206944, AA933673, AW104261, |
| | | | | | AI627565, AI264565, AW469909, |
| | | | | | AA845240, AA332515, AL021453.1. |
| HTDAF28 | 230 | 396835 | 1-898 | 15-912 | AI760170, AI150687, BF829200, AU158613, BF809865, |
| | | | | | AW273858, BE312404, BF316832, AU148518, |
| | | | | | BF314749, AU149720, BF315081, AI400198, AW062695, |
| | | | | | AI924082, BF314377, AW087415, |
| | | | | | BE047624, AI689214, AI684707, AA526748, BF315285, |
| | | | | | BE262228, AI566857, AI377786, AW167628, |
| | | | | | R65808, AA525309, R32753, AW663929, AI242434, |
| | | | | | BF206474, AI927229, R32754, AI956002, |
| | | | | | AI927230, AI701965, AU156607, BF349416, AW292033, |
| | | | | | AI368435, AA897436, BE314877, AI221593, |
| | | | | | AI612972, AI364630, BE185584, BF354201, AF352728.1, |
| | | | | | AF352729.1, AK022603.1. |
| HTEEB42 | 232 | 206980 | 1-1008 | 15-1022 | AL522795, AA725566, AI421450, AL522796, AI199779, |
| | | | | | AA406389, AA912674, AW022835, |
| | | | | | AI952846, AI123727, BE218057, AW022646, N90730, |
| | | | | | BF846982, BF845761, AI652914, BF056970, |
| | | | | | AW020783, AI312805, AW393829, AI017553, AW393887, |
| | | | | | AW474261, AW264246, BF848293, |
| | | | | | AI366088, AI418268, T89217, AI052637, AW082343, |
| | | | | | BF221504, AW593293, AA865038, AI201753, |
| | | | | | BF091146, AI140139, AA987434, AA410345, BF846977, |
| | | | | | BF846980, AW900593, BF932982, BF932991, |
| | | | | | AW865421, AW136481, AI650503, AI432092, T89127, |
| | | | | | AA974715, AW261924, BE938414, |
| | | | | | AF255910.1, AY016009.1, AP001694.1, AP000087.1, AP000225.1, |
| | | | | | AP000226.1, AP000086.1, |
| | | | | | AP000223.1. |
| HTEFU65 | 233 | 543396 | 1-1014 | 15-1028 | AW072387, R83559, AI924465, AI364031, AW513660, |
| | | | | | BF361111, AA705541, AL162032.1. |
| HTEGA76 | 234 | 381995 | 1-436 | 15-450 | BF059486, AW293425, AI190540, AI201137, AI026778, |
| | | | | | AI016787, AA604883, AW172655, AA393061, |
| | | | | | AA709172, AC002456.1. |
| HTELP17 | 236 | 836072 | 1-794 | 15-808 | AW976593, AW275003, BF103848, AA744857, AI458735, |
| | | | | | AW013800, AA453589, AI684921, |
| | | | | | AI184517, AI376535, AA621297, AI970221, AW015543, |
| | | | | | AA969112, AA992291, AA442130, W01308, |
| | | | | | H72782, AL519628, AA129060, AA460996, AA721433, |
| | | | | | BF665557, BE170715, AA460649, BG035897, |
| | | | | | H72781, AI382100, BF541499, AW800324, AI806305, |
| | | | | | BF885871, AI868710, AI241242, BE386136, |
| | | | | | AV723953, R75918, N75771, AI865320, AI355277, |
| | | | | | AI500061, AW088944, AI491842, BE544111, |
| | | | | | AI866469, AW007955, AI800464, AI335426, AI348777, |
| | | | | | BE891834, BG179438, AW409772, AL037582, |
| | | | | | AL037602, AV758017, AV712838, AV713988, AI536563, |
| | | | | | H42557, AV713143, AV755673, AV702147, |
| | | | | | AI174799, BE881061, BF814357, BF797305, AV721644, |
| | | | | | AI345010, AW021717, BG029829, BF793891, |
| | | | | | BF909758, AI538817, AW827289, AL037454, AW025279, |
| | | | | | AA766104, AV717730, AI817523, |
| | | | | | AL046942, BG001293, BF969354, AI554818, BE887537, |
| | | | | | AI583032, AI473536, BE789373, AI582932, |
| | | | | | AI590043, AV714010, AV717397, BG121959, AV706915, |
| | | | | | AV706624, AW027374, AA744531, |
| | | | | | AV703585, BF924856, AI819545, BE883591, AW196078, |
| | | | | | AI811631, AL036705, AI929108, BF997967, |
| | | | | | AI345745, BF921291, BE964497, AI279925, AI873638, |
| | | | | | BG029053, AI923989, AI288152, AI305745, |
| | | | | | AI539800, BF816685, AI567582, AL040694, BF751288, |
| | | | | | BG166654, AL039276, AW090102, AI440238, |
| | | | | | AW161202, AI309306, AI401697, AI679959, AI345131, |
| | | | | | AL118781, AW078818, AI628325, AI697324, |
| | | | | | AI471429, T69241, AI470293, AI687568, BG033723, |
| | | | | | BF826429, AW965840, AA603709, AI371786, |
| | | | | | AI376748, AL043355, AI499986, BG032919, AI866770, |
| | | | | | BF924855, AW827211, AW059713, |
| | | | | | BG107590, AI125884, AI866465, BF092710, BE612681, |
| | | | | | AV750565, AI452707, AI446721, AI912438, |
| | | | | | AI288335, AI371243, AW020425, AI568138, AV682249, |
| | | | | | AV763927, AI972112, BG164558, BF811802, |
| | | | | | AW020397, AV713908, AW160905, AV681643, AW150826, |
| | | | | | AI864102, BG031447, AW193467, |
| | | | | | BG171892, AW162189, AI345415, AA514684, BE927769, |
| | | | | | AW059765, AL039274, AV648334, |
| | | | | | BF792047, BF970768, AI866780, AI570140, AI648663, |
| | | | | | AI363957, BF341210, BF792781, BG253033, |
| | | | | | AI890887, AL045626, BE957870, AI560679, AI434969, |
| | | | | | AL110306, AI561228, AA652505, AW172723, |
| | | | | | AI802244, AW022494, BE536058, AV705066, BF904265, |
| | | | | | AW410430, BF752997, AW183130, N81164, |
| | | | | | AI954293, AL120254, AW163464, BG112644, AW021662, |
| | | | | | AI571000, BG165979, AI927256, AI250852, |
| | | | | | AV682289, BF812963, AI336575, AL040241, AV682300, |
| | | | | | AI799364, AI445620, AL040449, AI656270, |
| | | | | | BF337602, BE965724, BF814412, BG260037, AA806719, |
| | | | | | AW264895, BE964614, BF904180, |
| | | | | | BF032768, AW151132, BE965432, AI474646, AW089664, |
| | | | | | AI653769, AW089275, AW020095, |
| | | | | | AI434656, Z99428, AW834325, AI923833, AI285419, |
| | | | | | BG122101, AC000077.2, AK026885.1, |
| | | | | | BC008365.1, AK024570.1, AB063093.1, Y14040.1, X82434.1, |
| | | | | | AL136748.1, AF078844.1, |
| | | | | | AF073483.1, AF285836.1, AL050092.1, AK025958.1, AK025414.1, |
| | | | | | AK025435.1, AL122118.1, |
| | | | | | BC003591.1, AF218006.1, AK026613.1, AF218023.1, BC007522.1, |
| | | | | | BC003410.1, BC007534.1, |
| | | | | | AF090901.1, AL133072.1, AL136882.1, AK026583.1, BC004310.1, |
| | | | | | AB062978.1, AK025407.1, |
| | | | | | AL389935.1, AL136884.1, AL512719.1, AL359596.1, AB056420.1, |
| | | | | | AF090903.1, AK026556.1, |
| | | | | | Z82022.1, AL110280.1, D83032.1, AB055805.1, AL137283.1, |
| | | | | | AB060826.1, AF262032.1, |
| | | | | | AL133049.1, AK026608.1, BC001328.1, AK027164.1, AL049283.1, |
| | | | | | AL122050.1, AK026522.1, |
| | | | | | AL137533.1, AL136864.1, S76508.1, AK024545.1, BC008785.1, |
| | | | | | BC002750.1, BC005890.1, |
| | | | | | AK024944.1, AL133665.1, AK025099.1, AF155827.1, BC008455.1, |
| | | | | | BC003120.1, BC003573.1, |
| | | | | | AL162008.1, BC001785.1, AK025906.1, BC006164.1, AF225424.1, |
| | | | | | AK025209.1, AK026762.1, |
| | | | | | BC001964.1, AL122100.1, AB056372.1, Y14314.1, AK026038.1, |
| | | | | | AK026534.1, AL133081.1, |
| | | | | | BC000316.1, AK026630.1, AK025410.1, AF252872.1, BC003122.1, |
| | | | | | BC005070.1, AL137479.1, |
| | | | | | BC006807.1, AL162002.1, AL080074.1, AK026784.1, AK027160.1, |
| | | | | | AB055303.1, AB060887.1, |
| | | | | | AL136766.1, AK026464.1, BC006408.1, BC006159.1, AL353802.14, |
| | | | | | AL117460.1, AL117649.1, |
| | | | | | AK026649.1, AF044323.1, S77771.1, AK024538.1, BC008196.1, |
| | | | | | AL133067.1, BC003683.1, |
| | | | | | BC008649.1, AK026528.1, BC008416.1, AB048913.1, AL049382.1, |
| | | | | | AK027173.1, AK026797.1, |
| | | | | | AK027146.1, AK000421.1, AB050431.1, AK025524.1, AL137488.1, |
| | | | | | U88966.1, BC002777.1, |
| | | | | | AK026462.1, BC002688.1, Y16645.1, AL050024.1, Y10936.1, |
| | | | | | AK026642.1, AK025084.1, |
| | | | | | AK000083.1, AB052191.1, AB055368.1, BC006525.1, AF081571.1, |
| | | | | | AK027111.1, S61953.1, |
| | | | | | AF090934.1, BC008387.1, AL136615.1, BC008284.1, AL136786.1, |
| | | | | | BC004530.1, AF110640.1, |
| | | | | | AF159615.1, AF106697.1, AB063079.1, AL512689.1, BC003590.1, |
| | | | | | AL157482.1, AL050393.1, |
| | | | | | AL136540.1, AK027113.1, BC004883.1, AK026480.1, AF177336.1, |
| | | | | | BC008723.1, AL136789.1, |
| | | | | | AL133062.1, U72621.3, BC004960.1, AB049849.1, AL136640.1, |
| | | | | | AB047623.1, AK024747.1, |
| | | | | | BC002409.1, AK025375.1, AF232009.1, AF217987.1, AK025092.1, |
| | | | | | AK025491.1, AL080162.1, |
| | | | | | BC003548.1, BC002473.1, AK000647.1, BC002844.1, AY033593.1, |
| | | | | | AL137480.1, AK026506.1, |
| | | | | | AL162004.1, AK024546.1, BC007499.1, BC005002.1, BC008673.1, |
| | | | | | AL512718.1, AB060897.1, |
| | | | | | AK027161.1, AF202636.1, BC000090.1, AF061795.1, AK026452.1, |
| | | | | | AF151685.1, AL136754.1, |
| | | | | | BC003684.1, AF260566.1, AK000391.1, AL353956.1, AL136586.1, |
| | | | | | BC005997.1, AL136784.1, |
| | | | | | AL133560.1, AK026408.1, BC007053.1, AK024588.1, AK027096.1, |
| | | | | | BC006091.1, AL357195.1, |
| | | | | | AF218014.1, AK025857.1, AB060879.1, AK026749.1, AK000257.1, |
| | | | | | BC007680.1, AL137558.1, |
| | | | | | AL583915.1, AL117432.1, AL389982.1, S78214.1, AK024992.1, |
| | | | | | AB051158.1, AL389939.1, |
| | | | | | BC003614.1, AJ299431.1, AK027082.1, BC002357.1, AF141289.1, |
| | | | | | AK026947.1, AB048954.1, |
| | | | | | AB048975.1, AL110221.1, AL096744.1, AB060914.1, AK026631.1, |
| | | | | | AK026542.1, BC007326.1, |
| | | | | | AB050407.1, AL136850.1, AB060893.1, AF132676.1, AB060873.1, |
| | | | | | AF061836.1, AL117583.1, |
| | | | | | AL137648.1, AL512733.1, AL390184.1, AL137711.1, AB060888.1, |
| | | | | | AL110158.1, AF090900.1, |
| | | | | | AF274348.1, AF036268.1, AF274347.1. |
| HTELS08 | 237 | 847090 | 1-1884 | 15-1898 | AW664990, AA608835, BE972717, AA383680, AW572898, |
| | | | | | AI028204, AI554902, AI138881. |
| HTLEP53 | 238 | 634852 | 1-804 | 15-818 | BF876683, AI755202, AI066646, AW613805, AA084609, |
| | | | | | AW769151, BE169870, AA601674, |
| | | | | | AI561210, BF926568, AW265614, BF826830, AI613389, |
| | | | | | AL042667, AL042670, AW130427, |
| | | | | | BF868994, AW471092, AV760019, AW576485, AI281818, |
| | | | | | AA225956, N64587, AU157209, BF941382, |
| | | | | | AI340151, AI859834, AW328202, AV754716, AW501278, |
| | | | | | BG222269, AI955029, AL134440, AI799569, |
| | | | | | BG250286, AW518030, AW576437, BF725884, BE396138, |
| | | | | | AW974363, T05118, AA524616, AI732682, |
| | | | | | AW268329, AI192440, AA669741, AW166920, D58782, |
| | | | | | AI653493, AW238341, BE301068, AI955718, |
| | | | | | BF923179, BF526964, AW438850, AW438662, U95742.1, |
| | | | | | AC019205.4, AC027125.4, |
| | | | | | AL356299.16, AC007216.2, AC008649.6, AC005484.2, AC005098.2, |
| | | | | | AC005740.1, AB020868.1, |
| | | | | | AC008569.6, AL359091.10, AL136527.9, AC005527.3, AC005000.2, |
| | | | | | AC005529.7, AL121809.6, |
| | | | | | AC090883.1, AC006312.8, AC004166.12, AF250325.1, AL008726.3, |
| | | | | | AL139396.17, AC010913.9, |
| | | | | | Z85987.13, AL590762.1, AL121658.2, AJ246003.1, AP001781.4, |
| | | | | | AP001694.1, AC004867.5, |
| | | | | | AL133312.3, AL513550.9, AC008507.8, AL022476.2, AC005520.2, |
| | | | | | AC068533.7, AL160163.24, |
| | | | | | AC011485.6, AF111167.2, AC002544.1, AC004702.1, AL158141.14, |
| | | | | | AC005071.2, AC007191.1, |
| | | | | | AC005229.1, AL357515.26, AC010412.7, AL161670.4, AF196972.1, |
| | | | | | AL135927.14, AC007227.3, |
| | | | | | AC083884.6, AC004089.25, AL445483.13, AF165926.2, AC009060.7, |
| | | | | | AL359235.3, AC002350.1, |
| | | | | | AC005952.1, AC007052.4, AC020558.4, AL035071.17, AP000510.2, |
| | | | | | AC007731.14, |
| | | | | | AL121586.31, AL354815.10, AC005500.2, AC006014.2, AC005015.2, |
| | | | | | AL161893.24, |
| | | | | | AC005726.1, AC004985.2, AL161725.13, AC002390.1, AL450265.11, |
| | | | | | AL353135.32, |
| | | | | | AL160231.4, AC026672.44, AC004466.1, AC060231.6, AL360227.17, |
| | | | | | AL117382.28, |
| | | | | | AL021397.1, AC083863.2, AC011487.5, AL158824.11, AC018638.5, |
| | | | | | AL031283.26, AL121761.5, |
| | | | | | AC004242.1, AL020993.1, AL512641.9, AL121936.17, AC005280.3, |
| | | | | | AL035587.5, AC020916.7, |
| | | | | | AC067941.7, AC009812.17, AC012476.8, AL136228.8, AP001728.1, |
| | | | | | AL354808.24, |
| | | | | | AL049561.16, AL352984.4, AP000046.1, AC010378.6, AC000381.1, |
| | | | | | AC006480.3, AC006023.2, |
| | | | | | AL050308.9, AC005531.1, AL049776.3, AP000114.1, AC008551.5, |
| | | | | | AL031680.20, AL391827.18, |
| | | | | | AP001360.4, AL354707.17, AF111168.2, AL031683.2, U89337.1, |
| | | | | | AC010605.4, AL035367.5, |
| | | | | | AC002546.1, AL138724.12, AL033521.2, AC020906.6, AC078846.2, |
| | | | | | AC006452.4, AC007003.4, |
| | | | | | AC009244.24, AL049547.10, AL163279.2, AF064861.1, AC000025.2, |
| | | | | | AC027319.5, |
| | | | | | AL391280.15, AC008083.23, AC004253.1, AC008598.5, Y10196.1, |
| | | | | | AL049766.14, AL512666.6, |
| | | | | | AL138784.30, AC008891.7, AC004840.3, AC083873.3, AC005377.2, |
| | | | | | AC000360.35, |
| | | | | | AL049637.43, AL512378.7, AC008753.8, AC005488.2, AF001548.1, |
| | | | | | AC010422.7, AC009179.17, |
| | | | | | AC008623.4, AC004876.2, AP001717.1, AP001709.1, AC011465.4, |
| | | | | | AP000901.5, AL160471.5, |
| | | | | | AC006329.5, AL034405.16, AC008521.5, L44140.1, AC008481.7, |
| | | | | | U15177.1, AL162578.13, |
| | | | | | AC006449.19, Z97876.1, AC016830.5, AC008946.6, AL137792.11, |
| | | | | | AL109743.4, Z83844.5, |
| | | | | | AL049631.7, AC025275.4, AC091736.1, AP002453.3, AC006512.12, |
| | | | | | AC004491.1, AL356095.11, |
| | | | | | AC005291.1, AL136297.3, AC003982.1, AL022318.2, AC009086.5, |
| | | | | | AC005736.1, AC004824.3, |
| | | | | | Z84466.1, AP001670.1, AL157823.9, AC018904.6, AC002425.1, |
| | | | | | AF312032.1, AL109806.22, |
| | | | | | AL035413.19, AC006027.1, Z84469.1, AL513366.11, AC011737.10, |
| | | | | | AF196779.1, AC026756.15, |
| | | | | | AC008745.6, AC090527.3, AC006038.2, AC005318.1, AL391137.11, |
| | | | | | AC010543.8, AC005081.3, |
| | | | | | AC005522.2, AC005231.2, AC013726.7, AL109804.41, AC005399.19, |
| | | | | | AC004832.3, |
| | | | | | AC022148.5, AF134726.1, AC022007.3, AP002851.2, AL136084.11, |
| | | | | | AL031295.1, AP001748.1, |
| | | | | | AL121834.20, AC007686.5, AL049872.3, AL049569.13, AC016993.4, |
| | | | | | AC004805.1, |
| | | | | | AL133551.13, AL136966.27, AC004167.1, AP000237.1, AL117186.3, |
| | | | | | AL161747.5, AC005288.1, |
| | | | | | X54156.1, U94788.1, Z99127.1, AC016691.10, AC016025.12, |
| | | | | | AC010526.7, AC004890.2. |
| HTPCS72 | 240 | 854941 | 1-3421 | 15-3435 | AV716024, BF032601, BE884480, BG107409, BE896847, |
| | | | | | AA534380, BF996760, BE935961, |
| | | | | | AA625472, BF593809, AI275974, AA758011, AI091865, |
| | | | | | AA770655, AA826573, AA642458, |
| | | | | | AA284480, AA308157, BF316735, AA150509, AI338707, |
| | | | | | H98214, AI085686, AI613457, AW007656, |
| | | | | | BE677803, BE092569, AW083271, BF890758, AA156713, |
| | | | | | BF315290, BF687549, AI079204, R38877, |
| | | | | | AI561066, AW629504, Z44870, AI638057, AA468549, |
| | | | | | BF445676, AW771735, BF852685, AW173317, |
| | | | | | BF882397, BE092420, AA368918, AW969242, AI254739, |
| | | | | | T80580, AA406249, F07793, R55262, |
| | | | | | R12721, BE832360, R55263, AW900776, BF357645, |
| | | | | | F05814, Z40638, F04054, AA321781, AW021358, |
| | | | | | AA714089, BF886411, BE149465, H91564, AA954780, |
| | | | | | BF871030, AI640665, BF036620, F02061, |
| | | | | | AA243079, BF307290, BF835491, BE774931, H90643, |
| | | | | | N44003, AA307326, AW135695, BE927559, |
| | | | | | AA242996, BF757045, AW999558, AI002239, BE567146, |
| | | | | | D19832, AW672798, BF089866, W73266, |
| | | | | | AF017388, BE932984, BE832354, BE707285, AB040946.1, |
| | | | | | AL008639.15, AF139898.1, |
| | | | | | AK027079.1, AF131746.1. |
| HTPIH83 | 241 | 919916 | 1-1467 | 15-1481 | BE513091, BE304667, BG164062, AW385836, AW837727, |
| | | | | | AW837724, BF032123, BF541534, |
| | | | | | AW006504, AI769564, AW837723, AA552647, AW015998, |
| | | | | | AI343787, AI285131, AA976345, |
| | | | | | BE048787, AI949846, AI685788, AI953481, AW083920, |
| | | | | | BF819923, AI262767, AW194732, AA345449, |
| | | | | | AA639438, T86266, AI469683, AI244378, AI659323, |
| | | | | | T86158, BF758311, BG164241, AI932964, |
| | | | | | AV647382, BF104997, AI913916, AF177340.1, AL158821.16, |
| | | | | | AF250558.1. |
| HTSEW17 | 242 | 460579 | 1-638 | 15-652 | AA779073, AI860913, AI028060, AI024955, BE549714, |
| | | | | | AW136463, R07163, AW612172, BF773051, |
| | | | | | AF007146.1, AF381980.1. |
| HTTBI76 | 243 | 637725 | 1-1697 | 15-1711 | AA059411, BE568135, BE856883, BF435859, BF977217, |
| | | | | | AV701624, BE566398, BE856637, |
| | | | | | AA429722, BE564953, BE568948, BF214557, AA196423, |
| | | | | | AW237471, AA716665, AI377511, |
| | | | | | AA193289, N51319, BF248318, AI796263, AI770155, |
| | | | | | AA045194, BE380112, BF029088, AI185077, |
| | | | | | AA442760, BF214729, BE865742, AA810811, AI572127, |
| | | | | | AI494075, BE777718, AA128609, AA933879, |
| | | | | | BF027898, BF691014, BF977570, AV702879, AA421072, |
| | | | | | N63065, BE866018, AI373224, R99289, |
| | | | | | BG003427, BE568709, AA919169, AI580336, AW024454, |
| | | | | | BF057794, AA731146, AA128610, |
| | | | | | BF105164, AA062583, BF031391, BE866602, BF238619, |
| | | | | | AI758175, AA045378, D61992, BF211153, |
| | | | | | R99375, AA420992, AA194235, AA976350, AW135598, |
| | | | | | AI648675, BF436083, BE392607, AA383499, |
| | | | | | BF368270, AA878813, AA877180, BE379677, AI219249, |
| | | | | | AA846496, AV760348, AA380012, |
| | | | | | BE866426, AA453722, BF687711, BF213063, H84990, |
| | | | | | H86604, H86921, AL519369, AA383353, |
| | | | | | BE742087, AA007586, T85467, BE514581, BF573588, |
| | | | | | BF028113, AL521923, BF091941, BE548812, |
| | | | | | AI244008, H55168, AA379174, BE621508, AI200967, |
| | | | | | BF346162, AL137861.5, AC005690.8, |
| | | | | | AF277188.1. |
| HTTBS64 | 244 | 1008159 | 1-2044 | 15-2058 | AW801486, AL157701.2, AC006356.3, AC079033.12, AC025159.28, |
| | | | | | AL360078.16, |
| | | | | | AF002997.2, AL034428.4, AP001693.1, AL049873.3, Z83819.1, |
| | | | | | AL389889.11, AP001669.1, |
| | | | | | AL035552.9, AL590043.7, AC005406.2, AC009069.3, AC048346.13, |
| | | | | | AL354937.12, AL050401.5, |
| | | | | | AL136324.6, AL390800.4, AC073941.5, AP001597.1, AC012464.24, |
| | | | | | AC008277.4, AL121985.13, |
| | | | | | AC004988.2, AL359085.14, AC016623.5, AL163213.2, AL359850.7, |
| | | | | | AL357894.6, AL133247.1, |
| | | | | | AF003528.1, AC090946.1, AL021877.1, AL157779.6, AL137245.11, |
| | | | | | AC008250.23, AL031391.1, |
| | | | | | AL355530.6, AL589740.4, AL354750.12, AC002076.1, AL139090.11, |
| | | | | | AL354896.16, |
| | | | | | AC021863.5, AL121577.1, AL049732.11, AC012003.9, AL117259.6, |
| | | | | | AC010144.4, AC068061.5, |
| | | | | | AC068800.28, AL512452.7, AC010142.4, AC026691.4, AL354802.15, |
| | | | | | AL359252.17, |
| | | | | | AL512662.8, AC008506.7, AL022718.1, AC008462.6, AL356499.16, |
| | | | | | AL359332.2, AC019196.10, |
| | | | | | AL138479.4, AL137061.12, AP001331.1, AC019179.4, AL450333.13, |
| | | | | | AF003529.1, AL133444.4, |
| | | | | | AC034195.6, Z98753.1, AL161630.12, AL359273.11, AC005799.1, |
| | | | | | AL390247.11, AL392087.7, |
| | | | | | AL078594.36, AL139087.13, AL359999.11, AC004216.1, AC007543.4, |
| | | | | | AL033522.1, Z99571.1, |
| | | | | | AC012405.5, AL390959.12, AL160236.4, AL138773.4, AC079457.14, |
| | | | | | AC007158.10, |
| | | | | | AL359636.17, AC006979.2, AC002302.1, AL445687.5, AC005873.3, |
| | | | | | AC023095.7, |
| | | | | | AL136100.12, AC007214.13, AL162500.15, AC004160.1, AP001533.4, |
| | | | | | U82828.1, AC073273.9, |
| | | | | | AL034369.1, AL445985.10, AC006351.3, AC002065.1, AC022081.32, |
| | | | | | AL158053.14, |
| | | | | | AC010591.8, AC005284.1, AL355578.4, AC010534.7, AC005249.1, |
| | | | | | AC009466.17. |
| HTWKE60 | 245 | 634083 | 1-393 | 15-407 | BF664013, BF663121, BF663613, BF513422, AW450480, |
| | | | | | AW772007, AI741780, AA836248, |
| | | | | | AA927283, AI076561, AA832167, BE328468, AI122857, |
| | | | | | AA843388, AI051024, AA976372, AI128635, |
| | | | | | AI079659, AI377082, AI890194, BF433849, AI245546, |
| | | | | | BF431488, AA993068, W37347, AA664259, |
| | | | | | BF592129, AI078547, AI206154, BF476097, AA205973, |
| | | | | | AI628461, AA205959, AA564731, AW510675, |
| | | | | | AI333181, BE044542, AI220211, AA461495, AI205670, |
| | | | | | AW589962, AI659288, AI628811, AU145738, |
| | | | | | AI038255, AU146583, AI350952, N72913, AW172853, |
| | | | | | AA701323, AA879132, AA479117, AA928163, |
| | | | | | AI807914, AA053133, H96808, AI274742, AA446266, |
| | | | | | AW665166, AA983816, AI720197, BF593265, |
| | | | | | AI207274, F10245, R44951, W02663, AA773436, |
| | | | | | AI266048, BF438897, AA668420, AW593105, |
| | | | | | AA889759, H72321, AI051520, AA948635, AW973548, |
| | | | | | AA716356, AW418816, BE871115, AI677720, |
| | | | | | R07863, AI244578, AA206136, AA721247, AA626673, |
| | | | | | AA420708, R34711, R09438, AA653900, |
| | | | | | AI219624, T79760, AI269408, AA460570, BE743375, |
| | | | | | AI679772, W25733, AI927666, F30470, |
| | | | | | AA190369, AA420733, AA206135, AA206150, AK021823.1, |
| | | | | | AL021786.1. |
| HTXAJ12 | 246 | 1310814 | 1-661 | 15-675 | AA456896, BE783654, BG251027, AA768759, AI806785, |
| | | | | | AC083866.2, AC011005.7, V00584.1, |
| | | | | | K01562.1, AL035087.20, U84680.1. |
| HTXJM03 | 247 | 603918 | 1-2384 | 15-2398 | AL518347, BE742019, AI114655, BF514929, AL118845, |
| | | | | | BF880731, AA236989, AI140989, AW813468, |
| | | | | | BE841331, AW582445, AA252594, AA618239, AI823453, |
| | | | | | AI280443, BF988837, AL042692, BF989072, |
| | | | | | H15090, AW391644, BG011632, H15570, Z43079, |
| | | | | | H15630, AW813319, H22799, Z39170, AA252414, |
| | | | | | F07601, F11156, F05157, AA746494, H15091, |
| | | | | | F08825, W68008, AW813329, F03848, F01404, |
| | | | | | AA804351, AC005829.1, AB033093.1, BC006271.1. |
| HTXKF95 | 248 | 891275 | 1-961 | 15-975 | AI934965, AW574868, BF056901, BE676636, AA831751, |
| | | | | | AA814605, AW590381, AI857985, |
| | | | | | AA742405, BF592924, AI697328, BF059191, AW450001, |
| | | | | | AI341301, AI635420, AW610280, |
| | | | | | AA917582, AI418901, C01813, BE694168, AW291415, |
| | | | | | AA775165, BF798709, BF916068, AW975618, |
| | | | | | AW966330, AV718489, AW964468, AV699866, C14331, |
| | | | | | AV718681, AV720791, AW966065, |
| | | | | | AV718931, AW966389, AV724520, AW949645, D80522, |
| | | | | | AV738340, AV699550, D80133, D59610, |
| | | | | | AW973541, AV718692, D81026, AW960465, AW975613, |
| | | | | | AW975605, D80248, AW965177, |
| | | | | | AW377671, C14429, AW964532, AV722801, D80251, |
| | | | | | AW949641, AV720731, AW973488, AW973445, |
| | | | | | D51060, D51799, AW959469, AV741191, AV718938, |
| | | | | | AV718633, AW949630, C14389, AW978634, |
| | | | | | AW966062, D51423, AV720203, D80366, AW959799, |
| | | | | | AV719324, AW966059, AW973490, D59859, |
| | | | | | AV701004, AW959582, D80166, AW973474, AW964756, |
| | | | | | AW966053, D59619, D80269, AW978661, |
| | | | | | D80210, AW960553, D80240, D80253, AV719822, |
| | | | | | AW973307, AW964477, AW956434, AW973447, |
| | | | | | AV699927, AW966369, AV718707, AV720211, AV720878, |
| | | | | | AV719557, D80241, AV699447, D50979, |
| | | | | | AW966029, AW958993, D81030, AV723927, AW959136, |
| | | | | | AW966075, AW949656, D59373, |
| | | | | | AW949642, D80188, AW959202, AV720035, AW973334, |
| | | | | | AW966531, AW966534, D80227, |
| | | | | | AW966333, D58283, AW966022, D80212, AW978648, |
| | | | | | AW960473, D50995, AW966013, D59467, |
| | | | | | D51022, D80022, AW966041, D80219, AV719188, |
| | | | | | D80195, AW975621, AW959628, AW966378, |
| | | | | | AW973485, AW965163, D80391, D80164, D59275, |
| | | | | | AW966030, AW966054, AW966050, AW965158, |
| | | | | | D80043, D59787, AW959062, AV718440, AV719783, |
| | | | | | AV720028, D59502, AW959597, AW959570, |
| | | | | | AV719468, AV718800, AW965185, AW965197, AW965196, |
| | | | | | AW965184, AW965175, AV718844, |
| | | | | | AV720464, AV718770, AW973330, AW973482, AW958992, |
| | | | | | AW964488, AW962082, AW949654, |
| | | | | | D57483, C15076, D59889, D59927, D80196, |
| | | | | | AV720151, AV720533, D80024, D80378, AW949657, |
| | | | | | AA305409, AW966386, AW960454, AW962395, AW966368, |
| | | | | | AV720616, AW966032, AW966331, |
| | | | | | AW966398, AW966397, AV701839, AW956397, AW949629, |
| | | | | | AW949653, AW949631, AW949643, |
| | | | | | AW949618, AW949655, AV720220, AW966399, AA305578, |
| | | | | | AA514188, AV744662, D80038, |
| | | | | | AW966385, AW966043, AV744012, AW960504, AW973473, |
| | | | | | D80193, AW966388, AW962245, |
| | | | | | AW966380, AW965176, AW964737, AW966400, AW966332, |
| | | | | | AW960532, AV741187, AV741198, |
| | | | | | AV721386, AW949646, AW949633, AW949632, AW949658, |
| | | | | | D80045, C14014, AV744004, AA514186, |
| | | | | | AV744690, AV702035, D80268, AW752082, AV700889, |
| | | | | | AW753053, AW177440, AW966023, |
| | | | | | AV742001, AV720812, AV723097, AW966377, AW975623, |
| | | | | | D80439, AV744006, D59627, AW360811, |
| | | | | | AW178893, AV718530, BC008360.1, AC008083.23, AC004242.1, |
| | | | | | AF058696.1, AB028859.1, |
| | | | | | X67155.2, AF271371.1, D34614.1, AB002449.1, D88547.1, |
| | | | | | D50010.1, U79457.1, AB038216.1. |
| HTXON32 | 249 | 838288 | 1-1491 | 15-1505 | AA746911, AA410788, AA704393, AA181917, BG222813, |
| | | | | | BE301584, AA683069, AA507822, |
| | | | | | AI056177, AA228778, AA084609, BE178231, BE178064, |
| | | | | | AI678867, AU147162, AV747362, AI857836, |
| | | | | | BF821968, AI754170, AW769654, AA825827, AA468975, |
| | | | | | AW513071, AW328202, AW069412, |
| | | | | | BF950533, AI962030, AI188049, BG250286, AI915075, |
| | | | | | BG222564, BG222326, AV733824, AV759632, |
| | | | | | AA584862, BE246405, AK000114.1, AL035088.1, AC003691.1, |
| | | | | | AP001359.4, AC004605.1, |
| | | | | | Z94056.1, AC010422.7, AC004125.1, AC012157.20, AC007912.6, |
| | | | | | AC005368.1, AL031257.1, |
| | | | | | AL354680.14, AC079353.5, AF130417.4, AC005011.2, AP001672.1, |
| | | | | | AC005255.1, AL445071.14, |
| | | | | | AL354977.10, AC006013.3, AP000851.4, AC008945.6, AC003689.1, |
| | | | | | AC002288.1, AC006211.1, |
| | | | | | AP002751.3, AL133391.5, Z98200.8, AF001905.1, AC006597.2, |
| | | | | | AC012450.9, AC005840.2, |
| | | | | | AC008699.5, AC007934.7, AC002422.1, AP000347.1, AL162831.5, |
| | | | | | AC009408.3, AC026191.3, |
| | | | | | AL136992.22, AC007436.1, AL590381.4, AC008840.4, AL008721.1, |
| | | | | | AC005841.3, AC021325.5, |
| | | | | | AL451061.8, AL117382.28, AC008511.6, AC004846.2, AL355365.10, |
| | | | | | AC004531.1, |
| | | | | | AC007652.1, AP001972.4, AP001727.1, AC087237.14, AC010465.7, |
| | | | | | AL157877.11, |
| | | | | | AL355984.11, AC010601.5, AL356095.11, AC004916.2, AC008264.10, |
| | | | | | AC025457.5, |
| | | | | | AP001561.4, AP000008.1, AC018719.4, AC007773.1, AC009094.7, |
| | | | | | AC010234.5, AC011890.4, |
| | | | | | AL355812.23, AC025471.5, AC020913.6, AP000704.2, AL135905.6, |
| | | | | | AC021863.5, AC022087.8, |
| | | | | | AC004659.1, AL022329.9, AC027342.4, AC019212.4, AC017100.4, |
| | | | | | AC020928.6, AC004104.1, |
| | | | | | AC019184.3, AL160274.9, AL161899.21, Z82194.1, AC026811.4, |
| | | | | | AC015842.9, AC002420.1, |
| | | | | | AL035079.14, AL390239.16, AC008012.8, AP001691.1, AL138819.9, |
| | | | | | AC009142.10, |
| | | | | | AL512449.6, AC024028.10, AC079408.25, AC005015.2, AL451126.18, |
| | | | | | AF011889.1, |
| | | | | | AL032821.2, AC004999.1, AF131216.1, AL109963.4, AL021939.1, |
| | | | | | AC008474.7, AC004089.25, |
| | | | | | AL391666.5, AL353135.32, AC005081.3, AF001551.1, AL096699.11, |
| | | | | | AC012312.8, AL031657.5, |
| | | | | | AL158832.13, AC006030.2, AL355336.15, AL050320.19, AC002553.1, |
| | | | | | AC005480.3, |
| | | | | | AF017104.1, AP001825.4, AC009779.18, AC016554.7, AC037433.6, |
| | | | | | AL033519.42, AC006313.1, |
| | | | | | AC019050.4, AL109623.9, AC012150.16, AL138749.13, AP000067.1, |
| | | | | | AL132994.4, AC004491.1, |
| | | | | | AC007993.15, AC025165.27, AF196970.1, AL157817.13, AC002377.1, |
| | | | | | AP000495.1, |
| | | | | | AB020869.1, AC009224.6, AC010582.6, AL160397.17, AL136040.5, |
| | | | | | AC068513.7, |
| | | | | | AL133173.19, AC004057.1, AC004616.1, AL353777.18, AP003473.2, |
| | | | | | AC008958.6, Z97635.10, |
| | | | | | AC073057.6, AC008427.7, AL137790.4, AC006316.2, AC005537.2, |
| | | | | | AC067941.7, AL035604.15, |
| | | | | | AC004021.1, AL035462.21, Z84480.1, AC003009.1, AC016778.3, |
| | | | | | AL355312.24, AC005746.1, |
| | | | | | AC005768.17, AC003690.1, Z97054.1, AP000577.4, AC069292.12, |
| | | | | | AL138696.16, AL354799.12, |
| | | | | | AL158828.14. |
| HUFCJ30 | 250 | 638402 | 1-854 | 15-868 | AL533274, AI741266, AA194264, BF438670, BE855763, |
| | | | | | AI912191, BF109379, AI815187, AA521107, |
| | | | | | BE646628, AI911233, AA828445, AA429411, AI912933, |
| | | | | | AI423970, AI242299, BE042993, AW276617, |
| | | | | | AA905840, AA464614, AI394374, AW340805, AI096492, |
| | | | | | AI221797, AW129415, AI554269, |
| | | | | | AW969178, BG055418, AW029033, AW044596, AA582358, |
| | | | | | BE882568, AI870051, AA233165, |
| | | | | | AI933519, AI370473, BE676140, AW292630, AA429458, |
| | | | | | F03916, AA233241, F03174, AA193481, |
| | | | | | H61820, AA193313, AW080606, AL533316, AA442046, |
| | | | | | AW975876, AW971403, AW974801, |
| | | | | | AW976024, AW975037, AW971975, AW972292, AW975965, |
| | | | | | AW975031, AW975002, AW971404, |
| | | | | | AW975019, AW975952, AW979127, AW974786, AW975105, |
| | | | | | AW975032, AW974964, AW979238, |
| | | | | | AW971968, AW975930, AW975954, AW969673, AW979090, |
| | | | | | AW975154, AW979002, AW969727, |
| | | | | | AW976023, AW975434, AW979204, AW969680, AW969643, |
| | | | | | AW974806, AW979098, AW975942, |
| | | | | | AW975971, AW973213, AW979176, AW973717, AW971326, |
| | | | | | AW974658, AW973219, AW969885, |
| | | | | | AW974338, AW971375, AW974998, AW975981, AW979208, |
| | | | | | AW970969, AW975149, AW979169, |
| | | | | | AW974975, AW975027, AW971732, AW970936, AW974802, |
| | | | | | AW974823, AW970942, AW975028, |
| | | | | | AW972377, AW973270, AW970010, AW972296, AW973185, |
| | | | | | AW975020, AW975632, AW969839, |
| | | | | | AW973750, AW973819, AW969816, AW976511, AW979294, |
| | | | | | AW979106, AW976031, AW975966, |
| | | | | | AW975058, AW975015, AW979212, AW976982, AW971378, |
| | | | | | AW976000, AW969852, AW979220, |
| | | | | | AW975585, AW979219, AW973209, AW974785, AW975692, |
| | | | | | AW972680, AW974101, AW973967, |
| | | | | | AW974971, AW972880, AW970962, AW972817, AW969861, |
| | | | | | AW973785, AW975025, AW975022, |
| | | | | | AW975649, AW973252, AW975959, AW973812, AW976506, |
| | | | | | AW979076, AW969637, AW972440, |
| | | | | | AW972154, AW971254, AW970889, AW979232, AW971305, |
| | | | | | AW979142, AW975230, AW973821, |
| | | | | | AW975899, AW972774, AW975167, AW972226, AW972660, |
| | | | | | AW973814, AW973775, AW973217, |
| | | | | | AW969768, AW975896, AW973779, AW976003, AW979054, |
| | | | | | AW975941, AW973211, AW969874, |
| | | | | | AW970113, AW972884, AW973189, AW973202, AW972695, |
| | | | | | AW973805, AW972719, AW976515, |
| | | | | | AW975976, AW979165, AW976510, AW971954, AW975975, |
| | | | | | AW969884, AW972943, AW969759, |
| | | | | | AW979083, BF592735, AW970587, AW973650, AW979175, |
| | | | | | AW969931, AW973986, AW979064, |
| | | | | | AW975938, AL359608.1. |
| HUVEB53 | 251 | 571200 | 1-1488 | 15-1502 | BE786669, AA453165, BG027754, AI694207, AW751021, |
| | | | | | BE140357, BE140309, BF673837, AI827679, |
| | | | | | AI597942, AI831626, BF572868, AW131344, AV726756, |
| | | | | | BE844218, BE162515, AA188243, |
| | | | | | AW188015, AW044629, AA877403, AI127993, BF691063, |
| | | | | | AA989288, AA453945, AA191206, |
| | | | | | AV748508, AA481849, AA405313, BF670519, AI167809, |
| | | | | | AA431686, AA846755, AI041097, |
| | | | | | AA305896, BE844200, BE844214, AI160824, H13901, |
| | | | | | AA655009, R68945, W26226, AA861877, |
| | | | | | AW974213, H11654, AW953548, AA453440, AI587514, |
| | | | | | AI076451, AA405350, H04206, AW751099, |
| | | | | | AA855040, AA974088, H43741, Z33442, AA825311, |
| | | | | | AA036965, AA188839, BE844205, H04207, |
| | | | | | AA923377, AA903946, AV693909, BE968480, AA761680, |
| | | | | | AV724398, AV724896, AA352991, |
| | | | | | AA330417, AA887483, D57665, N51756, AA206627, |
| | | | | | D61904, BF440004, AI248842, H58383, |
| | | | | | AA975213, D79380, AA205353, BE785631, AA344562, |
| | | | | | AA864363, D61991, BE467097, AA773771, |
| | | | | | AA649813, AW592162, AA642834, D79365, N47004, |
| | | | | | AW900901, AA036966, D61899, D58112, |
| | | | | | AA579902, AA865874, AA722600, R68832, R40852, |
| | | | | | H45338, BF131609, AA007516, H13852, |
| | | | | | AI828027, AA431480, BE149422, AV686924, AW074757, |
| | | | | | D20526, AB032988.1, AL021396.8. |
| HWAAD63 | 252 | 838626 | 1-3294 | 15-3308 | BG058664, AW953071, BF668217, AL046409, AI284640, |
| | | | | | AW406162, BF852604, AU123691, |
| | | | | | AL046205, AW303196, D82290, AW301350, AI334443, |
| | | | | | AV761286, AL121235, AW274349, |
| | | | | | AW600804, BF339640, BF677892, AV763892, BG032943, |
| | | | | | AI572924, AI801482, AI431303, AL044940, |
| | | | | | AV740801, AV764490, BG249643, AV762098, AI270117, |
| | | | | | AW969629, AI732378, AW265385, |
| | | | | | AI963720, AI708009, AI350211, AU147104, AW473163, |
| | | | | | AA669840, AV735495, AI149478, AV763971, |
| | | | | | AA581903, AV759518, AV760937, AI754955, AL041690, |
| | | | | | AI583283, AV710066, AV763550, |
| | | | | | BG236735, AU145314, AW502975, AV742057, BG167743, |
| | | | | | BF940837, AW193265, AV760777, |
| | | | | | BF914859, BF918590, AF074667, AV763122, BF918640, |
| | | | | | BE908796, BG036337, AW513362, |
| | | | | | AA491814, AV759362, BF725315, AV762050, AV763354, |
| | | | | | AW021583, BF919090, AI203955, |
| | | | | | AA531580, AA613232, AA490183, D82542, AW576391, |
| | | | | | AI623720, AV739452, AV728425, BE350475, |
| | | | | | AW500125, AA521323, AA665330, AV702857, AV730391, |
| | | | | | BF347791, AA610491, T40452, AA584167, |
| | | | | | AW474160, AI613280, AV762139, BE253048, AI192631, |
| | | | | | AI732865, AW020992, AA938105, |
| | | | | | AV733830, AF074677, AV652936, AW276817, BE872393, |
| | | | | | AW088846, AW438643, AI434695, |
| | | | | | AI345654, AW270270, AI610159, AW274346, AW265170, |
| | | | | | BF680041, BF854876, AA469451, |
| | | | | | AI589230, AA584145, AW833862, BE047069, AI570261, |
| | | | | | BF347740, AI619997, AW264934, |
| | | | | | AL042420, BF475381, AW518220, BF942454, AV762009, |
| | | | | | AI708125, BF697673, AW148792, |
| | | | | | BE297262, AW731867, AV759505, AA457542, BF991286, |
| | | | | | BF806176, AV728410, AU159337, |
| | | | | | AW089322, BE164494, AA774222, AI345518, AW963497, |
| | | | | | AV763255, AI696962, AL041706, F36273, |
| | | | | | AA496508, AV764228, AA478355, AV713243, AV761613, |
| | | | | | BE677379, BF736198, BF916517, |
| | | | | | AW079135, AV735370, R99597, AA652764, AW029038, |
| | | | | | AV725423, AA410828, AW169517, |
| | | | | | BG250302, AV761786, BE393367, BF872630, AF063563, |
| | | | | | AV764241, AA601294, BF827410, |
| | | | | | BF812839, AL119691, AV760378, AA177061, BG177715, |
| | | | | | BF674620, AI298710, AW169151, |
| | | | | | AA502104, AI345681, AI345675, AA633798, AV761925, |
| | | | | | AA682912, BF965007, AV733710, |
| | | | | | BF680074, AV762768, AA579362, BE139146, BF217299, |
| | | | | | AV762111, AV764578, AL118559.6, |
| | | | | | AB038653.1, AC020904.6, AC009497.3, AC006581.16, AF001549.1, |
| | | | | | AC004638.1, AC008267.6, |
| | | | | | AL121601.13, AL109865.36, AL356915.19, AC018809.4, AL163973.1, |
| | | | | | AC023908.6, |
| | | | | | AC011465.4, AL160237.4, AP000459.3, AC005081.3, AC044797.5, |
| | | | | | AC009154.5, AP001760.1, |
| | | | | | AL035367.5, AC007298.17, AL139350.17, AC006329.5, AC004019.20, |
| | | | | | AC006038.2, |
| | | | | | AC011455.6, AC008616.6, AL354932.26, AC011461.4, AL161892.9, |
| | | | | | AC005911.6, |
| | | | | | AC008265.15, U80017.1, AP003357.2, U91323.1, AC018636.4, |
| | | | | | AC005562.1, AL096701.14, |
| | | | | | AL080243.21, AC011450.4, AL133367.4, AL162458.10, AL354720.14, |
| | | | | | AC020658.6, |
| | | | | | AL158830.17, AL050318.13, AC005839.1, AP001687.1, AC009144.5, |
| | | | | | AC005041.2, Z99495.1, |
| | | | | | AC002565.1, AC022007.3, AC018769.2, AP000031.1, AC008372.6, |
| | | | | | AC011811.42, AC008688.7, |
| | | | | | AC009298.3, AP000047.1, AL445222.9, AL163248.2, AL139113.21, |
| | | | | | AC006435.7, AL136219.17, |
| | | | | | AC011495.6, AC008562.4, AC022308.17, AC008537.5, AP001667.1, |
| | | | | | AL133399.1, AL353135.32, |
| | | | | | AL121809.6, AC005696.1, AC073838.6, AC002476.1, AC006028.3, |
| | | | | | AP000115.1, AL445928.8, |
| | | | | | Z69666.1, AC005522.2, AC084783.2, AL133485.3, AC016025.12, |
| | | | | | AC004906.3, AC008649.6, |
| | | | | | AP000553.1, AC009470.4, AL031054.1, AC007193.1, AP000338.2, |
| | | | | | AL117334.29, AC009530.5, |
| | | | | | AP001346.1, AL034380.26, AC016830.5, AC008403.6, AL049550.5, |
| | | | | | AC027644.9, AC011930.5, |
| | | | | | AL109965.34, AC006241.1, AL049869.6, Z83844.5, Z98941.1, |
| | | | | | AL031283.26, AL159191.4, |
| | | | | | AP000216.1, AC009996.7, AC015842.9, AL136295.3, AL139330.17, |
| | | | | | AC008745.6, AC005527.3, |
| | | | | | AC007731.14, U47924.1, AC012377.5, AC025212.5, AC005500.2, |
| | | | | | AC018751.30, Z93241.11, |
| | | | | | AL078638.9, AL354993.24, AC016769.10, AC005324.1, AL355517.12, |
| | | | | | AC074121.16, |
| | | | | | AC012170.6, AC006538.1, AP000962.2, AC004650.1, AC083884.6, |
| | | | | | AL354935.23, U52111.2, |
| | | | | | AC016027.15, AC079363.19, AP000113.1, AP000045.1, AL136123.19, |
| | | | | | AC007011.1, |
| | | | | | AL357150.7, AC008753.8, AL121675.36, AC002551.1, AL157838.24, |
| | | | | | AC009516.19, |
| | | | | | AC004865.1, AL139230.25, AC005529.7, AL050335.32, AC007216.2, |
| | | | | | AL049759.10, |
| | | | | | AP001716.1, AL021546.1, AC000360.35, AP001718.1, AE006639.1, |
| | | | | | AC025436.2, AL359091.10, |
| | | | | | AC004940.1, AC008101.15, AC003029.2, AL352978.6, AC020983.7, |
| | | | | | AL118520.26, |
| | | | | | AC007272.3, AC005154.1, AC078878.20, AL136980.5, AC005778.1, |
| | | | | | AC004971.3, |
| | | | | | AL033383.26, AC005921.3, AL159995.8, AC008068.4, AL008718.23, |
| | | | | | U95742.1, AC068712.6, |
| | | | | | AL024474.1, AC005031.1, AC017091.8, AC090514.1, AP001666.1, |
| | | | | | AL158040.13, AL161799.19, |
| | | | | | AL133387.8, AC003108.1, AC005808.1, AL109825.23, AC004033.3, |
| | | | | | Z98051.6, AC005295.1, |
| | | | | | AL353764.9, AC011236.8, AL132768.15, AC006285.11, Z99716.4, |
| | | | | | AL139396.17, AL096840.25, |
| | | | | | AL022098.1, AC005052.2, AC002300.1, AC007066.4, AL109797.18, |
| | | | | | AC004686.1, |
| | | | | | AL031662.26, AC008812.7, AL161656.20, AL136961.19, AC007404.4, |
| | | | | | AC020550.4, |
| | | | | | AJ003147.1, AP001858.4, AC021203.5, AC011559.3, AL117258.4, |
| | | | | | AC007620.30, AC010553.6, |
| | | | | | AP002028.1, AL356575.8, AP000299.1, AL121748.6, AL136300.22, |
| | | | | | AC016257.22, AC003684.1, |
| | | | | | AC004941.2, AL157406.19, AL049694.9, AL162853.17, U66059.1, |
| | | | | | AC026464.6, AL121972.17, |
| | | | | | AC013264.4, AL162426.20, AC006345.4, AC090960.1, AL049742.7, |
| | | | | | AC005037.2, AP000359.1, |
| | | | | | AC007051.3, AC018633.2, AL133174.15, AC008474.7, AC018635.6, |
| | | | | | AB023049.1, AC034198.6, |
| | | | | | AC022211.5. |
| HWADJ89 | 253 | 799506 | 1-1755 | 15-1769 | AW958273, AW377130, AW574767, AW138853, BF111962, |
| | | | | | AA135712, AA156931, AW264402, |
| | | | | | AW117200, AI684896, AW339989, AA524553, AI394626, |
| | | | | | AI754796, AI860485, AI989549, AW129957, |
| | | | | | AI672796, BG056354, AA040909, AI000898, AI421190, |
| | | | | | AI693729, AW512733, AW044450, AI090274, |
| | | | | | AW205364, AW081734, BE939287, N35410, AA788655, |
| | | | | | N55117, AA844145, AI091868, N62863, |
| | | | | | AW302517, AI361489, AI628038, AA765992, AI800010, |
| | | | | | AI817849, BF800164, AI285397, AW403436, |
| | | | | | AA658416, AA648845, F13408, N73777, AA983941, |
| | | | | | R34886, AI024148, T04873, AA310563, Z33435, |
| | | | | | R72500, AI219780, AI149773, BG248348, R49268, |
| | | | | | BE305119, BE293618, AI743430, AW440724, |
| | | | | | T78828, BE249965, F10993, BE250024, AI371489, |
| | | | | | BE171979, N77769, AW235832, AI204426, R34492, |
| | | | | | N48042, BF899137, BF842700, R34372, Z38685, |
| | | | | | N99398, AI857456, AW841803, BE176205, |
| | | | | | AW899803, AA665233, AI290874, AW591407, AI432644, |
| | | | | | BF757092, AI623302, AW968355, |
| | | | | | AI431347, AI432653, AW081103, AI431230, AI431328, |
| | | | | | AI432654, AI432655, AI431310, AI431312, |
| | | | | | AI432650, AI432677, AW968356, BE672759, AI431353, |
| | | | | | AW971740, AW972091, AW972093, |
| | | | | | AW968729, AI431307, AI431316, AI432661, AI431354, |
| | | | | | AI431315, AI431337, AI431257, AI492519, |
| | | | | | BE672745, BE672732, AI791349, AI432666, AI432675, |
| | | | | | AW128900, BE672748, AI431238, AI492520, |
| | | | | | BE672719, AI432651, AI432647, AI431330, AI432674, |
| | | | | | AI432672, BF448552, AW972092, BE672767, |
| | | | | | AI431243, AI431248, AI432665, AI432657, AI432658, |
| | | | | | AI432649, BE672644, AI431255, BE672774, |
| | | | | | BE672742, AW969229, AI431254, BF589777, AI431350, |
| | | | | | AI431231, AI432662, AI431345, BE672738, |
| | | | | | AI431357, AW858522, AI431241, AI431351, AI431323, |
| | | | | | AI431346, AI431247, AI431318, AI432676, |
| | | | | | AI432673, AI431235, AI431321, AW128897, AI431340, |
| | | | | | AI432643, BE672792, AW128846, AI432664, |
| | | | | | AI431246, AW972090, AI432645, AW128884, BE672743, |
| | | | | | AI492510, BE672640, AL042931, AI431314, |
| | | | | | AW129223, AI431308, BE672749, BE672744, AI492509, |
| | | | | | BE672622, AI431751, BE672627, AL042729, |
| | | | | | AL045494, AL042655, BE672626, AL042523, AL042519, |
| | | | | | AL042853, AL031296.1, AK026719.1, |
| | | | | | AB007922.2, AF052104.1, AF064854.1, AL133082.1. |
| HWBCP79 | 254 | 846382 | 1-1124 | 15-1138 | AW935696, BF358707, BF358705, BF347791, BF674056, |
| | | | | | BE394054, BF945587, AA503600, BF347740, |
| | | | | | BF915002, AA169263, BF030530, AA580808, AA630672, |
| | | | | | AA127426, F12561, AV762741, AA828749, |
| | | | | | F34498, AV760634, BE005691, AA362349, BE790132, |
| | | | | | AA584876, AA838190, AI801482, BF149427, |
| | | | | | AI708009, BG059568, D52587, AA316905, M86120, |
| | | | | | AL121870.9, AL031255.1, AL135838.5, |
| | | | | | AC009533.9, AC002565.1, AE006462.1, Y18000.1, AC011895.4, |
| | | | | | AF312032.1, AC005529.7, |
| | | | | | AC006432.15, AC002094.1, AC005523.1, AP000350.1, AC007242.3, |
| | | | | | AC005087.2, AL163195.5, |
| | | | | | AC004882.2, AC018809.4, Z99716.4, Z83844.5, AL357075.17, |
| | | | | | AP000009.2, AP000150.1, |
| | | | | | AC006241.1, AC006251.3, AC007193.1, AC020893.5, U78027.1, |
| | | | | | AL031281.6, X76666.1, |
| | | | | | AL356983.33, AC005859.1, AC007272.3, AC007488.15, AC009570.13, |
| | | | | | AC007686.5, |
| | | | | | AL020997.1, AL499604.9, AP001965.2, AC005772.1, AL133153.3, |
| | | | | | AC005972.1, AC018637.3, |
| | | | | | AC021188.6, AC079177.21, AL445483.13, AL160414.18, AC008481.7, |
| | | | | | AC006597.2, |
| | | | | | AL136300.22, AC008753.8, AC010654.8, AC013726.7, AC007226.3, |
| | | | | | AL049870.3, AL157823.9, |
| | | | | | AC068724.7, U67825.1, AF111169.2, AC007318.4, AC004531.1, |
| | | | | | D26141.1, AC010489.4, |
| | | | | | AC007541.9, AL133405.17, Z98744.1, AP000111.1, AP000043.1, |
| | | | | | AL390074.17, AC010271.6, |
| | | | | | AC003690.1, AF241728.1, AL133418.4, AP001870.2, AC078878.20, |
| | | | | | AC004638.1, AL590762.1, |
| | | | | | AC005592.1, AL139809.16, AL136132.15, Z93023.1, AL009181.1, |
| | | | | | Z86090.10, AC005952.1, |
| | | | | | AC004953.1, AC005081.3, AC009086.5, AP001716.1, U47924.1, |
| | | | | | AC010422.7, AF283321.1, |
| | | | | | Z96074.4, AL117350.12, Z97192.2, AC020916.7, AC018821.4, |
| | | | | | AC011475.6, AL034451.26, |
| | | | | | U95090.1, AL590763.1, AC006120.1, AL356057.12, AC010126.3, |
| | | | | | AF114156.1, AL162390.9, |
| | | | | | AP003534.1, AL133243.1, AL162729.8, AL139054.1, AC003035.1, |
| | | | | | AB047869.1, AC005846.1, |
| | | | | | AL158052.10, AC009032.7, AC002455.1, Z83820.1, AC008891.7, |
| | | | | | AL163760.4, Z82182.2, |
| | | | | | AC007536.9, AC010519.6, AL138756.23, AC009475.4, AC005703.2, |
| | | | | | AC009779.18, |
| | | | | | AL358434.16, AL161629.10, AL391241.21, AC022212.4, AC008863.7. |
| HWBEM18 | 255 | 949402 | 1-6715 | 15-6729 | BF970102, BF968719, BF982135, BE870739, BG177864, |
| | | | | | AW960084, AA502912, BE258859, |
| | | | | | BG248298, AI050870, AW006390, BE251201, AL119604, |
| | | | | | AW502481, BE536266, AW499634, |
| | | | | | AW401673, AI440347, AA310795, BG002481, AW501564, |
| | | | | | BE936524, AW501912, AW502940, |
| | | | | | AW501421, AW574552, AA524413, AW501492, AA524099, |
| | | | | | BF880552, BF313383, AV721883, |
| | | | | | BE675707, AW662450, AW970671, AW468042, AI688921, |
| | | | | | AW167025, AI970597, AI028774, |
| | | | | | AW188383, AW150222, AW083366, BE856306, AW504125, |
| | | | | | AA394112, AI802599, AA515127, |
| | | | | | AW499749, AW504539, BF974759, AA420978, AA632926, |
| | | | | | BE074737, BE074644, AW081261, |
| | | | | | BF755502, BE718644, BF892245, AW512533, BF932868, |
| | | | | | BF762091, BE840091, R82177, N55034, |
| | | | | | BF765799, AI814038, AW407844, AA504752, AA446015, |
| | | | | | AW748135, AA652891, AI000287, R82219, |
| | | | | | BE703532, F06324, BF814512, BF801697, BE551369, |
| | | | | | BF914193, AA478999, BF941470, BF765280, |
| | | | | | AV645387, AI191730, AA456551, AW406901, BF879805, |
| | | | | | BE703523, AW505537, AA577322, R11808, |
| | | | | | AA504654, BE718546, AA661852, BF913969, AA995856, |
| | | | | | AA321769, AI672210, AW270191, |
| | | | | | AA357086, AA477935, BE184342, BF879774, AA292315, |
| | | | | | BF364749, BF761813, BE831022, |
| | | | | | BE831018, BF154962, AL039259, BF360151, AW403756, |
| | | | | | BF763866, AA470467, AV755015, |
| | | | | | BF801703, BF907768, H62806, W76432, AA278264, |
| | | | | | H91643, BE184319, T99718, AW603140, |
| | | | | | BF843173, AA347047, BF901997, AA902263, BF448311, |
| | | | | | BF886674, AA278730, AW867470, |
| | | | | | BF800847, W04875, BF379714, BE831024, AI953093, |
| | | | | | AI200728, AA687290, AW511092, AI018458, |
| | | | | | AA486391, BF811403, W72039, BF767354, AW468272, |
| | | | | | AI675899, AI870318, BF968440, AI923553, |
| | | | | | AW027693, AB020713.1, AL117527.1, AK026042.1, AC090942.1, |
| | | | | | AC066589.3, AC069246.5, |
| | | | | | AC090885.1, AC027124.4, AC022234.3, AC090958.1, AC018841.3, |
| | | | | | X87546.1. |
| HWBFX31 | 256 | 799427 | 1-1663 | 15-1677 | H93613, N75773, N22551, AA884923, AW873751, |
| | | | | | H93612, AC039057.8. |
| HWHGZ51 | 257 | 886212 | 1-1685 | 15-1699 | BE735965, AW372956, BF826018, BE735558, AW007721, |
| | | | | | AI955624, N30735, BF842481, AA531286, |
| | | | | | BE735650, AA476961, AA479609, AA709157, N29329, |
| | | | | | BF813297, AI680020, BF814081, W72299, |
| | | | | | AW450151, BF349121, AI342682, BE713111, AI207356, |
| | | | | | BE713103, BE713065, AA459897, AI206356, |
| | | | | | W23589, BF349122, BE939515, BE714549, W76325, |
| | | | | | W35267, AW272943, AA158001, AA442947, |
| | | | | | BE713172, BG012569, T69460, AA321599, AW135072, |
| | | | | | AA369339, BE713162, AI202455, AA369441, |
| | | | | | N57021, W68131, BE713086, BE713074, T69437, |
| | | | | | BE713165, AI301772, T70492, T70513, BF738317, |
| | | | | | AW389438, BE717812, D29356, BE717821, AA127911, |
| | | | | | AA846442, AA127966, BF842499, BF739402, |
| | | | | | BE140441, BE048026, AV658585, AL037582, AL037602, |
| | | | | | BG179993, AI802542, AV741327, AI628337, |
| | | | | | BE184331, N29277, AL040241, AW079572, BF812960, |
| | | | | | BF792961, AV743962, BG114432, AI469505, |
| | | | | | AL042745, AV757865, AL079963, BF970768, AI698391, |
| | | | | | BG110684, AI499285, BE968711, BF751302, |
| | | | | | AI570807, AI345416, AI345612, BF726183, AI824576, |
| | | | | | BF724420, AI345415, BE789764, F37323, |
| | | | | | AI627988, BG256090, AL043355, BG113188, BF856052, |
| | | | | | AV658845, AI884318, AI491775, AV656595, |
| | | | | | BF924855, AI886594, BG104927, AW051088, BF032768, |
| | | | | | BG111560, AV713305, BF526020, AI540458, |
| | | | | | AA287231, AW880037, AV733448, AI288285, AW983832, |
| | | | | | BF725534, BE047852, BG029086, |
| | | | | | BF970652, AA580663, BE963838, BG167986, AI538850, |
| | | | | | AI580436, AW673679, BF055899, AI440239, |
| | | | | | AI685005, AI687295, BG058150, AA833760, AA225339, |
| | | | | | AI241923, AI568138, BE018334, BG033723, |
| | | | | | BF054877, BG115626, BF338002, AL042744, AW303152, |
| | | | | | BG001235, AI673363, BG030364, |
| | | | | | AW090393, AI783997, AL042191, BF812938, BF752245, |
| | | | | | BF727091, AI670009, AV718258, |
| | | | | | AW020561, AI433157, AI818358, AI702073, AI473536, |
| | | | | | BF911521, AV757052, BF868489, AV682124, |
| | | | | | AI682798, T95813, BF812961, AI570966, AL036214, |
| | | | | | AI345778, AI932794, AW163834, BE879108, |
| | | | | | AW827206, AI564259, BG110682, BG058398, AA641818, |
| | | | | | AI633125, AI866040, BE535384, AI538564, |
| | | | | | AI638798, AW161156, AI915291, AW152182, BG117375, |
| | | | | | AW051059, BF811804, AV681993, |
| | | | | | BG166654, AI866770, AL041150, AW104141, AI800440, |
| | | | | | BE877904, BF086116, AI433590, BE069120, |
| | | | | | AA806720, BE778453, BG180605, AL036673, BG112456, |
| | | | | | AI969655, AV733734, AL514887, |
| | | | | | AW827103, BG028116, BE964614, AI539847, AI863191, |
| | | | | | AI254727, AL039086, AI445992, BF885081, |
| | | | | | AI345608, BG029667, AI345688, AW083573, AI572717, |
| | | | | | AL036631, BF816037, AI613038, AW834302, |
| | | | | | BF909758, AW026882, AL038445, AI868931, R36271, |
| | | | | | BF872365, BG110517, BG257547, BG164558, |
| | | | | | AI267454, AI581033, AI623941, AI568114, AW167918, |
| | | | | | AA743354, AV714798, AV757035, |
| | | | | | AW983829, BF794478, AJ223603.2, AF082889.1, AC018758.2, |
| | | | | | AL353940.1, BC006472.1, |
| | | | | | AF132676.1, AF061836.1, AL137533.1, AL137294.1, AB055352.1, |
| | | | | | AF262032.1, AL137271.1, |
| | | | | | AL137480.1, AF056191.1, AL117435.1, AL080154.1, X72889.1, |
| | | | | | AK024538.1, BC004370.1, |
| | | | | | AB047941.1, AL389935.1, AL117460.1, BC002473.1, AL136845.1, |
| | | | | | BC006103.1, AL389939.1, |
| | | | | | AB050431.1, Z82022.1, AL512733.1, BC003548.1, AL122093.1, |
| | | | | | AB052191.1, AK026762.1, |
| | | | | | AL110221.1, AL049430.1, AL359583.1, AF217982.1, AF146568.1, |
| | | | | | AL050155.1, AB062750.1, |
| | | | | | AL137476.1, AL137557.1, AB060873.1, BC001655.1, X65873.1, |
| | | | | | AL512718.1, AB055371.1, |
| | | | | | AL137463.1, AB056427.1, AK027144.1, BC008282.1, AL442082.1, |
| | | | | | AK026600.1, AL133606.1, |
| | | | | | AF285167.1, AL122050.1, AB050410.1, AK026642.1, BC004925.1, |
| | | | | | AK025414.1, AB060908.1, |
| | | | | | AK025435.1, BC007534.1, AL136864.1, AL137488.1, AL080148.1, |
| | | | | | AL512719.1, AL512750.1, |
| | | | | | AK026480.1, BC003614.1, AL390154.1, BC004530.1, AB056421.1, |
| | | | | | BC007053.1, AK026593.1, |
| | | | | | AK024594.1, X82434.1, AK000418.1, AB047904.1, AB060929.1, |
| | | | | | AK027146.1, AL133665.1, |
| | | | | | AF104032.1, BC005007.1, BC008673.1, AB060826.1, AK026583.1, |
| | | | | | BC009395.1, AL359596.1, |
| | | | | | AB049758.1, AL137658.1, AL080137.1, AF100781.1, AF090934.1, |
| | | | | | AF358829.1, AL137478.1, |
| | | | | | AB055370.1, BC004899.1, AK026613.1, BC000090.1, AK026506.1, |
| | | | | | BC002733.1, AF321617.1, |
| | | | | | AB062978.1, AL137479.1, S61953.1, BC005858.1, AF218031.1, |
| | | | | | AK026885.1, BC002523.1, |
| | | | | | BC000348.1, AF061795.1, AF151685.1, AY034001.1, AK026542.1, |
| | | | | | AF320073.1, AF026816.2, |
| | | | | | AK024992.1, AK027081.1, AJ299431.1, AK026626.1, BC008417.1, |
| | | | | | AL137550.1, AK025491.1, |
| | | | | | AL359601.1, AL117578.1, AL136893.1, AL359618.1, U80742.1, |
| | | | | | AF111112.1, BC008387.1, |
| | | | | | AK027096.1, AL133640.1, AF225424.1, AL137459.1, AF183393.1, |
| | | | | | BC004958.1, AB048975.1, |
| | | | | | AB063079.1, AB056809.1, AB052200.1, AK026927.1, AF061943.1, |
| | | | | | AL096744.1, AF090901.1, |
| | | | | | AF057300.1, AF057299.1, X98834.1, AL133067.1, Y16645.1, |
| | | | | | AL133558.1, AK026528.1, |
| | | | | | AB063070.1, AK027161.1, BC006440.1, AF177336.1, AL136844.1, |
| | | | | | AB056420.1, AL137538.1, |
| | | | | | AB063093.1, AK027164.1, AL136843.1, BC007567.1, AL133075.1, |
| | | | | | AK025312.1, AF125948.1, |
| | | | | | AL583915.1, AL157431.1, AK025484.1, BC008078.1, BC008893.1, |
| | | | | | AK025465.1, AL137548.1, |
| | | | | | AL137521.1, AL136784.1, AL050366.1, AK027868.1, AF230496.1, |
| | | | | | AK026855.1, AB060905.1, |
| | | | | | AB060837.1, AL096720.1, AK026462.1, AL136540.1, BC004349.1, |
| | | | | | X69819.1, BC004951.1, |
| | | | | | BC004362.1, BC009212.1, Y14314.1, AL050149.1, AL110225.1, |
| | | | | | AL122098.1, AL136892.1, |
| | | | | | AL389982.1, AL136805.1, AL050277.1, AK026504.1, AK025391.1, |
| | | | | | AK027121.1, AB048953.1, |
| | | | | | AC021325.5, AL512754.1, AB063074.1, AK026630.1, AL080234.1, |
| | | | | | AL162062.1, AL359620.1, |
| | | | | | AB063100.1, BC001844.1, AB055361.1, AK024570.1, BC008983.1, |
| | | | | | AL359941.1, AB060912.1, |
| | | | | | BC003683.1, AB060897.1, AF143723.1, BC005168.1, AK026744.1, |
| | | | | | AL117416.1, BC004195.1, |
| | | | | | AK026784.1, AL122100.1, AL122118.1, AB056768.1, AY033593.1, |
| | | | | | BC007499.1, AL110280.1, |
| | | | | | AL133560.1, AL080124.1, AK026647.1, BC009033.1, AK024588.1, |
| | | | | | AK026086.1, AL049283.1, |
| | | | | | BC008899.1, AB048919.1, AK026959.1, AK000647.1, AB048974.1, |
| | | | | | AL136792.1, Z37987.1, |
| | | | | | AL137529.1, BC007680.1, BC006525.1, BC001056.1, AL050116.1, |
| | | | | | BC003684.1, AL137558.1. |
| HWTBK81 | 258 | 460568 | 1-623 | 15-637 | T89795, AW769449, AA774621, AA954176, BF879355, |
| | | | | | H04799, BF879528, BE394321, R39277, |
| | | | | | T89429, R42299, AA873122, AC009238.4, AC008268.3, |
| | | | | | AC016683.7. |

Description of Table 4

[0165] Table 4 provides a key to the tissue/cell source identifier code disclosed in Table 1B.2, column 5. Column 1 provides the tissue/cell source identifier code disclosed in Table 1B.2, Column 5. Columns 2-5 provide a description of the tissue or cell source. Note that “Description” and “Tissue” sources (i.e. columns 2 and 3) having the prefix “a_” indicates organs, tissues, or cells derived from “adult” sources. Codes corresponding to diseased tissues are indicated in column 6 with the word “disease.” The use of the word “disease” in column 6 is non-limiting. The tissue or cell source may be specific (e.g. a neoplasm), or may be disease-associated (e.g., a tissue sample from a normal portion of a diseased organ). Furthermore, tissues and/or cells lacking the “disease” designation may still be derived from sources directly or indirectly involved in a disease state or disorder, and therefore may have a further utility in that disease state or disorder. In numerous cases where the tissue/cell source is a library, column 7 identifies the vector used to generate the library.

TABLE 4

| Code | Description | Tissue | Organ | Cell Line | Disease | Vector |
|---|---|---|---|---|---|---|
| AR022 | a_Heart | a_Heart | | | | |
| AR023 | a_Liver | a_Liver | | | | |
| AR024 | a_mammary gland | a_mammary gland | | | | |
| AR025 | a_Prostate | a_Prostate | | | | |
| AR026 | a_small intestine | a_small intestine | | | | |
| AR027 | a_Stomach | a_Stomach | | | | |
| AR028 | Blood B cells | Blood B cells | | | | |
| AR029 | Blood B cells activated | Blood B cells activated | | | | |
| AR030 | Blood B cells resting | Blood B cells resting | | | | |
| AR031 | Blood T cells activated | Blood T cells activated | | | | |
| AR032 | Blood T cells resting | Blood T cells resting | | | | |
| AR033 | brain | brain | | | | |
| AR034 | breast | breast | | | | |
| AR035 | breast cancer | breast cancer | | | | |
| AR036 | Cell Line CAOV3 | Cell Line CAOV3 | | | | |
| AR037 | cell line PA-1 | cell line PA-1 | | | | |
| AR038 | cell line transformed | cell line transformed | | | | |
| AR039 | colon | colon | | | | |
| AR040 | colon (9808co65R) | colon (9808co65R) | | | | |
| AR041 | colon (9809co15) | colon (9809co15) | | | | |
| AR042 | colon cancer | colon cancer | | | | |
| AR043 | colon cancer (9808co64R) | colon cancer (9808co64R) | | | | |
| AR044 | colon cancer 9809co14 | colon cancer 9809co14 | | | | |
| AR050 | Donor II B Cells 24 hrs | Donor II B Cells 24 hrs | | | | |
| AR051 | Donor II B Cells 72 hrs | Donor II B Cells 72 hrs | | | | |
| AR052 | Donor II B-Cells 24 hrs. | Donor II B-Cells 24 hrs. | | | | |
| AR053 | Donor II B-Cells 72 hrs | Donor II B-Cells 72 hrs | | | | |
| AR054 | Donor II Resting B Cells | Donor II Resting B Cells | | | | |
| AR055 | Heart | Heart | | | | |
| AR056 | Human Lung (clonetech) | Human Lung (clonetech) | | | | |
| AR057 | Human Mammary | Human Mammary | | | | |
| | (clontech) | (clontech) | | | | |
| AR058 | Human Thymus | Human Thymus (clonetech) | | | | |
| | (clonetech) | | | | | |
| AR059 | Jurkat (unstimulated) | Jurkat (unstimulated) | | | | |
| AR060 | Kidney | Kidney | | | | |
| AR061 | Liver | Liver | | | | |
| AR062 | Liver (Clontech) | Liver (Clontech) | | | | |
| AR063 | Lymphocytes chronic | Lymphocytes chronic | | | | |
| | lymphocytic leukaemia | lymphocytic leukaemia | | | | |
| AR064 | Lymphocytes diffuse large | Lymphocytes diffuse | | | | |
| | B cell lymphoma | large B cell | | | | |
| | | lymphoma | | | | |
| AR065 | Lymphocytes follicular | Lymphocytes follicular | | | | |
| | lymphoma | lymphoma | | | | |
| AR066 | normal breast | normal breast | | | | |
| AR067 | Normal Ovarian (4004901) | Normal Ovarian (4004901) | | | | |
| AR068 | Normal Ovary 9508G045 | Normal Ovary 9508G045 | | | | |
| AR069 | Normal Ovary 9701G208 | Normal Ovary 9701G208 | | | | |
| AR070 | Normal Ovary 9806G005 | Normal Ovary 9806G005 | | | | |
| AR071 | Ovarian Cancer | Ovarian Cancer | | | | |
| AR072 | Ovarian Cancer | Ovarian Cancer | | | | |
| | (9702G001) | (9702G001) | | | | |
| AR073 | Ovarian Cancer | Ovarian Cancer | | | | |
| | (9707G029) | (9707G029) | | | | |
| AR074 | Ovarian Cancer | Ovarian Cancer | | | | |
| | (9804G011) | (9804G011) | | | | |
| AR075 | Ovarian Cancer | Ovarian Cancer | | | | |
| | (9806G019) | (9806G019) | | | | |
| AR076 | Ovarian Cancer | Ovarian Cancer | | | | |
| | (9807G017) | (9807G017) | | | | |
| AR077 | Ovarian Cancer | Ovarian Cancer | | | | |
| | (9809G001) | (9809G001) | | | | |
| AR078 | ovarian cancer 15799 | ovarian cancer | | | | |
| | | 15799 | | | | |
| AR079 | Ovarian Cancer 17717AID | Ovarian Cancer | | | | |
| | | 17717AID | | | | |
| AR080 | Ovarian Cancer | Ovarian Cancer | | | | |
| | 4004664B1 | 4004664B1 | | | | |
| AR081 | Ovarian Cancer | Ovarian Cancer 4005315A1 | | | | |
| | 4005315A1 | | | | | |
| AR082 | ovarian cancer 94127303 | ovarian cancer 94127303 | | | | |
| AR083 | Ovarian Cancer 96069304 | Ovarian Cancer 96069304 | | | | |
| AR084 | Ovarian Cancer 9707G029 | Ovarian Cancer 9707G029 | | | | |
| AR085 | Ovarian Cancer 9807G045 | Ovarian Cancer 9807G045 | | | | |
| AR086 | ovarian cancer 9809G001 | ovarian cancer 9809G001 | | | | |
| AR087 | Ovarian Cancer | Ovarian Cancer | | | | |
| | 9905C032RC | 9905C032RC | | | | |
| AR088 | Ovarian cancer 9907 C00 | Ovarian cancer | | | | |
| | 3rd | 9907 C00 3rd | | | | |
| AR089 | Prostate | Prostate | | | | |
| AR090 | Prostate (clonetech) | Prostate (clonetech) | | | | |
| AR091 | prostate cancer | prostate cancer | | | | |
| AR092 | prostate cancer #15176 | prostate cancer #15176 | | | | |
| AR093 | prostate cancer #15509 | prostate cancer #15509 | | | | |
| AR094 | prostate cancer #15673 | prostate cancer #15673 | | | | |
| AR095 | Small Intestine (Clontech) | Small Intestine (Clontech) | | | | |
| AR096 | Spleen | Spleen | | | | |
| AR097 | Thymus T cells activated | Thymus T cells activated | | | | |
| AR098 | Thymus T cells resting | Thymus T cells resting | | | | |
| AR099 | Tonsil | Tonsil | | | | |
| AR100 | Tonsil geminal center | Tonsil geminal center | | | | |
| | centroblast | centroblast | | | | |
| AR101 | Tonsil germinal center B | Tonsil germinal center | | | | |
| | cell | B cell | | | | |
| AR102 | Tonsil lymph node | Tonsil lymph node | | | | |
| AR103 | Tonsil memory B cell | Tonsil memory B cell | | | | |
| AR104 | Whole Brain | Whole Brain | | | | |
| AR105 | Xenograft ES-2 | Xenograft ES-2 | | | | |
| AR106 | Xenograft SW626 | Xenograft SW626 | | | | |
| AR119 | 001: IL-2 | 001: IL-2 | | | | |
| AR120 | 001: IL-2.1 | 001: IL-2.1 | | | | |
| AR121 | 001: IL-2_b | 001: IL-2_b | | | | |
| AR124 | 002: Monocytes untreated | 002: Monocytes untreated | | | | |
| | (1 hr) | (1 hr) | | | | |
| AR125 | 002: Monocytes untreated | 002: Monocytes untreated | | | | |
| | (5 hrs) | (5 hrs) | | | | |
| AR126 | 002: Control.1C | 002: Control.1C | | | | |
| AR127 | 002: IL2.1C | 002: IL2.1C | | | | |
| AR130 | 003: Placebo-treated Rat | 003: Placebo-treated Rat | | | | |
| | Lacrimal Gland | Lacrimal Gland | | | | |
| AR131 | 003: Placebo-treated Rat | 003: Placebo-treated Rat | | | | |
| | Submandibular Gland | Submandibular Gland | | | | |
| AR135 | 004: Monocytes untreated | 004: Monocytes untreated | | | | |
| | (5 hrs) | (5 hrs) | | | | |
| AR136 | 004: Monocytes untreated | 004: Monocytes untreated | | | | |
| | 1 hr | 1 hr | | | | |
| AR139 | 005: Placebo (48 hrs) | 005: Placebo (48 hrs) | | | | |
| AR140 | 006: pC4 (24 hrs) | 006: pC4 (24 hrs) | | | | |
| AR141 | 006: pC4 (48 hrs) | 006: pC4 (48 hrs) | | | | |
| AR152 | 007: PHA(1 hr) | 007: PHA(1 hr) | | | | |
| AR153 | 007: PHA(6 HRS) | 007: PHA(6 HRS) | | | | |
| AR154 | 007: PMA(6 hrs) | 007: PMA(6 hrs) | | | | |
| AR155 | 008: 1449_#2 | 008: 1449_#2 | | | | |
| AR161 | 01: A - max 24 | 01: A - max 24 | | | | |
| AR162 | 01: A - max 26 | 01: A - max 26 | | | | |
| AR163 | 01: A - max 30 | 01: A - max 30 | | | | |
| AR164 | 01: B - max 24 | 01: B - max 24 | | | | |
| AR165 | 01: B - max 26 | 01: B - max 26 | | | | |
| AR166 | 01: B - max 30 | 01: B - max 30 | | | | |
| AR167 | 1449 Sample | 1449 Sample | | | | |
| AR168 | 3T3P10 1.0 uM insulin | 3T3P10 1.0 uM insulin | | | | |
| AR169 | 3T3P10 10 nM Insulin | 3T3P10 10 nM Insulin | | | | |
| AR170 | 3T3P10 10 uM insulin | 3T3P10 10 uM insulin | | | | |
| AR171 | 3T3P10 No Insulin | 3T3P10 No Insulin | | | | |
| AR172 | 3T3P4 | 3T3P4 | | | | |
| AR173 | Adipose (41892) | Adipose (41892) | | | | |
| AR174 | Adipose Diabetic (41611) | Adipose Diabetic (41611) | | | | |
| AR175 | Adipose Diabetic (41661) | Adipose Diabetic (41661) | | | | |
| AR176 | Adipose Diabetic (41689) | Adipose Diabetic (41689) | | | | |
| AR177 | Adipose Diabetic (41706) | Adipose Diabetic (41706) | | | | |
| AR178 | Adipose Diabetic (42352) | Adipose Diabetic (42352) | | | | |
| AR179 | Adipose Diabetic (42366) | Adipose Diabetic (42366) | | | | |
| AR180 | Adipose Diabetic (42452) | Adipose Diabetic (42452) | | | | |
| AR181 | Adipose Diabetic (42491) | Adipose Diabetic (42491) | | | | |
| AR182 | Adipose Normal (41843) | Adipose Normal (41843) | | | | |
| AR183 | Adipose Normal (41893) | Adipose Normal (41893) | | | | |
| AR184 | Adipose Normal (42452) | Adipose Normal (42452) | | | | |
| AR185 | Adrenal Gland | Adrenal Gland | | | | |
| AR186 | Adrenal Gland + Whole | Adrenal Gland + Whole | | | | |
| | Brain | Brain | | | | |
| AR187 | B7(1 hr)+ (inverted) | B7(1 hr)+ (inverted) | | | | |
| AR188 | Breast (18275A2B) | Breast (18275A2B) | | | | |
| AR189 | Breast (4004199) | Breast (4004199) | | | | |
| AR190 | Breast (4004399) | Breast (4004399) | | | | |
| AR191 | Breast (4004943B7) | Breast (4004943B7) | | | | |
| AR192 | Breast (4005570B1) | Breast (4005570B1) | | | | |
| AR193 | Breast Cancer | Breast Cancer | | | | |
| | (4004127A30) | (4004127A30) | | | | |
| AR194 | Breast Cancer | Breast Cancer | | | | |
| | (400443A21) | (400443A21) | | | | |
| AR195 | Breast Cancer | Breast Cancer | | | | |
| | (4004643A2) | (4004643A2) | | | | |
| AR196 | Breast Cancer | Breast Cancer | | | | |
| | (4004710A7) | (4004710A7) | | | | |
| AR197 | Breast Cancer | Breast Cancer | | | | |
| | (4004943A21) | (4004943A21) | | | | |
| AR198 | Breast Cancer (400553A2) | Breast Cancer | | | | |
| | | (400553A2) | | | | |
| AR199 | Breast Cancer | Breast Cancer | | | | |
| | (9805C046R) | (9805C046R) | | | | |
| AR200 | Breast Cancer | Breast Cancer | | | | |
| | (9806C012R) | (9806C012R) | | | | |
| AR201 | Breast Cancer (ODQ | Breast Cancer | | | | |
| | 45913) | (ODQ 45913) | | | | |
| AR202 | Breast Cancer | Breast Cancer | | | | |
| | (ODQ45913) | (ODQ45913) | | | | |
| AR203 | Breast Cancer | Breast Cancer | | | | |
| | (ODQ4591B) | (ODQ4591B) | | | | |
| AR204 | Colon Cancer (15663) | Colon Cancer (15663) | | | | |
| AR205 | Colon Cancer | Colon Cancer (4005144A4) | | | | |
| | (4005144A4) | | | | | |
| AR206 | Colon Cancer | Colon Cancer (4005413A4) | | | | |
| | (4005413A4) | | | | | |
| AR207 | Colon Cancer (4005570B1) | Colon Cancer (4005570B1) | | | | |
| AR208 | Control RNA #1 | Control RNA #1 | | | | |
| AR209 | Control RNA #2 | Control RNA #2 | | | | |
| AR210 | Cultured Preadipocyte | Cultured Preadipocyte | | | | |
| | (blue) | (blue) | | | | |
| AR211 | Cultured Preadipocyte | Cultured Preadipocyte | | | | |
| | (Red) | (Red) | | | | |
| AR212 | Donor II B-Cells 24 hrs | Donor II B-Cells 24 hrs | | | | |
| AR213 | Donor II Resting B-Cells | Donor II Resting B-Cells | | | | |
| AR214 | H114EP12 10 nM Insulin | H114EP12 10 nM Insulin | | | | |
| AR215 | H114EP12 (10 nM insulin) | H114EP12 (10 nM insulin) | | | | |
| AR216 | H114EP12 (2.6 ug/ul) | H114EP12 (2.6 ug/ul) | | | | |
| AR217 | H114EP12 (3.6 ug/ul) | H114EP12 (3.6 ug/ul) | | | | |
| AR218 | HUVEC #1 | HUVEC #1 | | | | |
| AR219 | HUVEC #2 | HUVEC #2 | | | | |
| AR221 | L6 undiff. | L6 undiff. | | | | |
| AR222 | L6 Undifferentiated | L6 Undifferentiated | | | | |
| AR223 | L6P8 + 10 nM Insulin | L6P8 + 10 nM Insulin | | | | |
| AR224 | L6P8 + HS | L6P8 + HS | | | | |
| AR225 | L6P8 10 nM Insulin | L6P8 10 nM Insulin | | | | |
| AR226 | Liver (00-06-A007B) | Liver (00-06-A007B) | | | | |
| AR227 | Liver (96-02-A075) | Liver (96-02-A075) | | | | |
| AR228 | Liver (96-03-A144) | Liver (96-03-A144) | | | | |
| AR229 | Liver (96-04-A138) | Liver (96-04-A138) | | | | |
| AR230 | Liver (97-10-A074B) | Liver (97-10-A074B) | | | | |
| AR231 | Liver (98-09-A242A) | Liver (98-09-A242A) | | | | |
| AR232 | Liver Diabetic (1042) | Liver Diabetic (1042) | | | | |
| AR233 | Liver Diabetic (41616) | Liver Diabetic (41616) | | | | |
| AR234 | Liver Diabetic (41955) | Liver Diabetic (41955) | | | | |
| AR235 | Liver Diabetic (42352R) | Liver Diabetic (42352R) | | | | |
| AR236 | Liver Diabetic (42366) | Liver Diabetic (42366) | | | | |
| AR237 | Liver Diabetic (42483) | Liver Diabetic (42483) | | | | |
| AR238 | Liver Diabetic (42491) | Liver Diabetic (42491) | | | | |
| AR239 | Liver Diabetic (99-09- | Liver Diabetic (99-09- | | | | |
| | A281A) | A281A) | | | | |
| AR240 | Lung | Lung | | | | |
| AR241 | Lung (27270) | Lung (27270) | | | | |
| AR242 | Lung (2727Q) | Lung (2727Q) | | | | |
| AR243 | Lung Cancer (4005116A1) | Lung Cancer (4005116A1) | | | | |
| AR244 | Lung Cancer (4005121A5) | Lung Cancer (4005121A5) | | | | |
| AR245 | Lung Cancer | Lung Cancer (4005121A5)) | | | | |
| | (4005121A5)) | | | | | |
| AR246 | Lung Cancer (4005340A4) | Lung Cancer (4005340A4) | | | | |
| AR247 | Mammary Gland | Mammary Gland | | | | |
| AR248 | Monocyte (CT) | Monocyte (CT) | | | | |
| AR249 | Monocyte (OCT) | Monocyte (OCT) | | | | |
| AR250 | Monocytes (CT) | Monocytes (CT) | | | | |
| AR251 | Monocytes (INFG 18 hr) | Monocytes (INFG 18 hr) | | | | |
| AR252 | Monocytes (INFG 18 hr) | Monocytes (INFG 18 hr) | | | | |
| AR253 | Monocytes (INFG 8-11) | Monocytes (INFG 8-11) | | | | |
| AR254 | Monocytes (O CT) | Monocytes (O CT) | | | | |
| AR255 | Muscle (91-01-A105) | Muscle (91-01-A105) | | | | |
| AR256 | Muscle (92-04-A059) | Muscle (92-04-A059) | | | | |
| AR257 | Muscle (97-11-A056d) | Muscle (97-11-A056d) | | | | |
| AR258 | Muscle (99-06-A210A) | Muscle (99-06-A210A) | | | | |
| AR259 | Muscle (99-07-A203B) | Muscle (99-07-A203B) | | | | |
| AR260 | Muscle (99-7-A203B) | Muscle (99-7-A203B) | | | | |
| AR261 | Muscle Diabetic (42352R) | Muscle Diabetic (42352R) | | | | |
| AR262 | Muscle Diabetic (42366) | Muscle Diabetic (42366) | | | | |
| AR263 | NK-19 Control | NK-19 Control | | | | |
| AR264 | NK-19 IL Treated 72 hrs | NK-19 IL Treated 72 hrs | | | | |
| AR265 | NK-19 UK Treated 72 hrs. | NK-19 UK Treated 72 hrs. | | | | |
| AR266 | Omentum Normal (94-08- | Omentum Normal (94-08- | | | | |
| | B009) | B009) | | | | |
| AR267 | Omentum Normal (97-01- | Omentum Normal (97-01- | | | | |
| | A039A) | A039A) | | | | |
| AR268 | Omentum Normal (97-04- | Omentum Normal (97-04- | | | | |
| | A114C) | A114C) | | | | |
| AR269 | Omentum Normal (97-06- | Omentum Normal (97-06- | | | | |
| | A117C) | A117C) | | | | |
| AR270 | Omentum Normal (97-09- | Omentum Normal (97-09- | | | | |
| | B004C) | B004C) | | | | |
| AR271 | Ovarian Cancer | Ovarian Cancer | | | | |
| | (17717AID) | (17717AID) | | | | |
| AR272 | Ovarian Cancer | Ovarian Cancer | | | | |
| | (9905C023RC) | (9905C023RC) | | | | |
| AR273 | Ovarian Cancer | Ovarian Cancer | | | | |
| | (9905C032RC) | (9905C032RC) | | | | |
| AR274 | Ovary (9508G045) | Ovary (9508G045) | | | | |
| AR275 | Ovary (9701G208) | Ovary (9701G208) | | | | |
| AR276 | Ovary 9806G005 | Ovary 9806G005 | | | | |
| AR277 | Pancreas | Pancreas | | | | |
| AR278 | Placebo | Placebo | | | | |
| AR279 | rIL2 Control | rIL2 Control | | | | |
| AR280 | RSS288L | RSS288L | | | | |
| AR281 | RSS288LC | RSS288LC | | | | |
| AR282 | Salivary Gland | Salivary Gland | | | | |
| AR283 | Skeletal Muscle | Skeletal Muscle | | | | |
| AR284 | Skeletal Muscle (91-01- | Skeletal Muscle (91-01- | | | | |
| | A105) | A105) | | | | |
| AR285 | Skeletal Muscle (42180) | Skeletal Muscle (42180) | | | | |
| AR286 | Skeletal Muscle (42386) | Skeletal Muscle (42386) | | | | |
| AR287 | Skeletal Muscle (42461) | Skeletal Muscle (42461) | | | | |
| AR288 | Skeletal Muscle (91-01- | Skeletal Muscle (91-01- | | | | |
| | A105) | A105) | | | | |
| AR289 | Skeletal Muscle (92-04- | Skeletal Muscle (92-04- | | | | |
| | A059) | A059) | | | | |
| AR290 | Skeletal Muscle (96-08- | Skeletal Muscle (96-08- | | | | |
| | A171) | A171) | | | | |
| AR291 | Skeletal Muscle (97-07- | Skeletal Muscle (97-07- | | | | |
| | A190A) | A190A) | | | | |
| AR292 | Skeletal Muscle Diabetic | Skeletal Muscle Diabetic | | | | |
| | (42352) | (42352) | | | | |
| AR293 | Skeletal Muscle Diabetic | Skeletal Muscle Diabetic | | | | |
| | (42366) | (42366) | | | | |
| AR294 | Skeletal Muscle Diabetic | Skeletal Muscle Diabetic | | | | |
| | (42395) | (42395) | | | | |
| AR295 | Skeletal Muscle Diabetic | Skeletal Muscle Diabetic | | | | |
| | (42483) | (42483) | | | | |
| AR296 | Skeletal Muscle Diabetic | Skeletal Muscle Diabetic | | | | |
| | (42491) | (42491) | | | | |
| AR297 | Skeletal Muscle Diabetic | Skeletal Muscle Diabetic | | | | |
| | 42352 | 42352 | | | | |
| AR298 | Skeletal Musle (42461) | Skeletal Musle (42461) | | | | |
| AR299 | Small Intestine | Small Intestine | | | | |
| AR300 | Stomach | Stomach | | | | |
| AR301 | T-Cell + HDPBQ71.fc | T-Cell + HDPBQ71.fc | | | | |
| | 1449 16 hrs | 1449 16 hrs | | | | |
| AR302 | T-Cell + HDPBQ71.fc | T-Cell + HDPBQ71.fc | | | | |
| | 1449 6 hrs | 1449 6 hrs | | | | |
| AR303 | T-Cell + IL2 16 hrs | T-Cell + IL2 16 hrs | | | | |
| AR304 | T-Cell + IL2 6 hrs | T-Cell + IL2 6 hrs | | | | |
| AR306 | T-Cell Untreated 16 hrs | T-Cell Untreated 16 hrs | | | | |
| AR307 | T-Cell Untreated 6 hrs | T-Cell Untreated 6 hrs | | | | |
| AR308 | T-Cells 24 hours | T-Cells 24 hours | | | | |
| AR309 | T-Cells 24 hrs | T-Cells 24 hrs | | | | |
| AR310 | T-Cells 24 hrs. | T-Cells 24 hrs. | | | | |
| AR311 | T-Cells 24 hrs | T-Cells 24 hrs | | | | |
| AR312 | T-Cells 4 days | T-Cells 4 days | | | | |
| AR313 | Thymus | Thymus | | | | |
| AR314 | TRE | TRE | | | | |
| AR315 | TREC | TREC | | | | |
| AR317 | B lymphocyte, | B lymphocyte, | | | | |
| AR318 | (non-T; non-B) | (non-T; non-B) | | | | |
| AR326 | 001 - 293 RNA (Vector | 001 - 293 RNA (Vector | | | | |
| | Control) | Control) | | | | |
| AR327 | 001: Control | 001: Control | | | | |
| AR328 | 001: Control.1 | 001: Control.1 | | | | |
| AR355 | Acute Lymphocyte | Acute Lymphocyte | | | | |
| | Leukemia | Leukemia | | | | |
| AR356 | AML Patient #11 | AML Patient #11 | | | | |
| AR357 | AML Patient #2 | AML Patient #2 | | | | |
| AR358 | AML Patient #2 SGAH | AML Patient #2 SGAH | | | | |
| AR359 | AML Patient#2 | AML Patient#2 | | | | |
| AR360 | Aorta | Aorta | | | | |
| AR361 | B Cell | B Cell | | | | |
| AR362 | B lymphoblast | B lymphoblast | | | | |
| AR363 | B lymphocyte | B lymphocyte | | | | |
| AR364 | B lymphocytes | B lymphocytes | | | | |
| AR365 | B-cell | B-cell | | | | |
| AR366 | B-Cells | B-Cells | | | | |
| AR367 | B-Lymphoblast | B-Lymphoblast | | | | |
| AR368 | B-Lymphocytes | B-Lymphocytes | | | | |
| AR369 | Bladder | Bladder | | | | |
| AR370 | Bone Marrow | Bone Marrow | | | | |
| AR371 | Bronchial Epithelial Cell | Bronchial Epithelial Cell | | | | |
| AR372 | Bronchial Epithelial Cells | Bronchial Epithelial Cells | | | | |
| AR373 | Caco-2A | Caco-2A | | | | |
| AR374 | Caco-2B | Caco-2B | | | | |
| AR375 | Caco-2C | Caco-2C | | | | |
| AR376 | Cardiac #1 | Cardiac #1 | | | | |
| AR377 | Cardiac #2 | Cardiac #2 | | | | |
| AR378 | Chest Muscle | Chest Muscle | | | | |
| AR381 | Dendritic Cell | Dendritic Cell | | | | |
| AR382 | Dendritic cells | Dendritic cells | | | | |
| AR383 | E. coli | E. coli | | | | |
| AR384 | Epithelial Cells | Epithelial Cells | | | | |
| AR385 | Esophagus | Esophagus | | | | |
| AR386 | FPPS | FPPS | | | | |
| AR387 | FPPSC | FPPSC | | | | |
| AR388 | HepG2 Cell Line | HepG2 Cell Line | | | | |
| AR389 | HepG2 Cell line Buffer 1 hr. | HepG2 Cell line | | | | |
| | | Buffer 1 hr. | | | | |
| AR390 | HepG2 Cell line Buffer 06 hr | HepG2 Cell line Buffer | | | | |
| | | 06 hr | | | | |
| AR391 | HepG2 Cell line Buffer 24 hr. | HepG2 Cell line Buffer | | | | |
| | | 24 hr. | | | | |
| AR392 | HepG2 Cell line Insulin 01 hr. | HepG2 Cell line Insulin | | | | |
| | | 01 hr. | | | | |
| AR393 | HepG2 Cell line Insulin 06 hr. | HepG2 Cell line Insulin | | | | |
| | | 06 hr. | | | | |
| AR394 | HepG2 Cell line Insulin 24 hr. | HepG2 Cell line Insulin | | | | |
| | | 24 hr. | | | | |
| AR398 | HMC-1 | HMC-1 | | | | |
| AR399 | HMCS | HMCS | | | | |
| AR400 | HMSC | HMSC | | | | |
| AR401 | HUVEC #3 | HUVEC #3 | | | | |
| AR402 | HUVEC #4 | HUVEC #4 | | | | |
| AR404 | KIDNEY NORMAL | KIDNEY NORMAL | | | | |
| AR405 | KIDNEY TUMOR | KIDNEY TUMOR | | | | |
| AR406 | KIDNEY TUMOR | | | | | |
| AR407 | Lymph Node | Lymph Node | | | | |
| AR408 | Macrophage | Macrophage | | | | |
| AR409 | Megakarioblast | Megakarioblast | | | | |
| AR410 | Monocyte | Monocyte | | | | |
| AR411 | Monocytes | Monocytes | | | | |
| AR412 | Myocardium | Myocardium | | | | |
| AR413 | Myocardium #3 | Myocardium #3 | | | | |
| AR414 | Myocardium #4 | Myocardium #4 | | | | |
| AR415 | Myocardium #5 | Myocardium #5 | | | | |
| AR416 | NK | NK | | | | |
| AR417 | NK cell | NK cell | | | | |
| AR418 | NK cells | NK cells | | | | |
| AR419 | NKYa | NKYa | | | | |
| AR420 | NXYa019 | NKYa019 | | | | |
| AR421 | Ovary | Ovary | | | | |
| AR422 | Patient #11 | Patient #11 | | | | |
| AR423 | Peripheral blood | Peripheral blood | | | | |
| AR424 | Primary Adipocytes | Primary Adipocytes | | | | |
| AR425 | Promyeloblast | Promyeloblast | | | | |
| AR427 | RSSWT | RSSWT | | | | |
| AR428 | RSSWTC | RSSWTC | | | | |
| AR429 | SW 480(G1) | SW 480(G1) | | | | |
| AR430 | SW 480(G2) | SW 480(G2) | | | | |
| AR431 | SW 480(G3) | SW 480(G3) | | | | |
| AR432 | SW 480(G4) | SW 480(G4) | | | | |
| AR433 | SW 480(G5) | SW 480(G5) | | | | |
| AR434 | T Lymphoblast | T Lymphoblast | | | | |
| AR435 | T Lymphocyte | T Lymphocyte | | | | |
| AR436 | T-Cell | T-Cell | | | | |
| AR438 | T-Cell, | T-Cell, | | | | |
| AR439 | T-Cells | T-Cells | | | | |
| AR440 | T-lymphoblast | T-lymphoblast | | | | |
| AR441 | Th 1 | Th 1 | | | | |
| AR442 | Th 2 | Th 2 | | | | |
| AR443 | Th1 | Th1 | | | | |
| AR444 | Th2 | Th2 | | | | |
| H0004 | Human Adult Spleen | Human Adult Spleen | Spleen | | | Uni-ZAP XR |
| H0007 | Human Cerebellum | Human Cerebellum | Brain | | | Uni-ZAP XR |
| H0008 | Whole 6 Week Old | | | | | Uni-ZAP XR |
| | Embryo | | | | | |
| H0009 | Human Fetal Brain | | | | | Uni-ZAP XR |
| H0012 | Human Fetal Kidney | Human Fetal Kidney | Kidney | | | Uni-ZAP XR |
| H0013 | Human 8 Week Whole | Human 8 Week | Embryo | | | Uni-ZAP XR |
| | Embryo | Old Embryo | | | | |
| H0014 | Human Gall Bladder | Human Gall Bladder | Gall Bladder | | | Uni-ZAP XR |
| H0015 | Human Gall Bladder, | Human Gall Bladder | Gall Bladder | | | Uni-ZAP XR |
| | fraction II | | | | | |
| H0016 | Human Greater Omentum, | Human Greater Omentum | peritoneum | | | Uni-ZAP XR |
| H0017 | Human Greater Omentum, | Human Greater Omentum | peritoneum | | | Uni-ZAP XR |
| H0022 | Jurkat Cells | Jurkat T-Cell Line | | | | Lambda ZAP II |
| H0024 | Human Fetal Lung III | Human Fetal Lung | Lung | | | Uni-ZAP XR |
| H0025 | Human Adult Lymph Node | Human Adult Lymph Node | Lymph Node | | | Lambda ZAP II |
| H0030 | Human Placenta | | | | | Uni-ZAP XR |
| H0031 | Human Placenta | Human Placenta | Placenta | | | Uni-ZAP XR |
| H0032 | Human Prostate | Human Prostate | Prostate | | | Uni-ZAP XR |
| H0033 | Human Pituitary | Human Pituitary | | | | Uni-ZAP XR |
| H0036 | Human Adult Small | Human Adult Small | Small Int. | | | Uni-ZAP XR |
| | Intestine | Intestine | | | | |
| H0038 | Human Testes | Human Testes | Testis | | | Uni-ZAP XR |
| H0039 | Human Pancreas Tumor | Human Pancreas Tumor | Pancreas | | disease | Uni-ZAP XR |
| H0040 | Human Testes Tumor | Human Testes Tumor | Testis | | disease | Uni-ZAP XR |
| H0041 | Human Fetal Bone | Human Fetal Bone | Bone | | | Uni-ZAP XR |
| H0042 | Human Adult Pulmonary | Human Adult Pulmonary | Lung | | | Uni-ZAP XR |
| H0046 | Human Endometrial Tumor | Human Endometrial Tumor | Uterus | | disease | Uni-ZAP XR |
| H0050 | Human Fetal Heart | Human Fetal Heart | Heart | | | Uni-ZAP XR |
| H0051 | Human Hippocampus | Human Hippocampus | Brain | | | Uni-ZAP XR |
| H0052 | Human Cerebellum | Human Cerebellum | Brain | | | Uni-ZAP XR |
| H0056 | Human Umbilical Vein, | Human Umbilical Vein | Umbilical | | | Uni-ZAP XR |
| | Endo. remake | Endothelial Cells | vein | | | |
| H0057 | Human Fetal Spleen | | | | | Uni-ZAP XR |
| H0059 | Human Uterine Cancer | Human Uterine Cancer | Uterus | | disease | Lambda ZAP II |
| H0063 | Human Thymus | Human Thymus | Thymus | | | Uni-ZAP XR |
| H0068 | Human Skin Tumor | Human skin Tumor | Skin | | disease | Uni-ZAP XR |
| H0069 | Human Activated T-Cells | Activated T-Cells | Blood | Cell Line | | Uni-ZAP XR |
| H0070 | Human Pancreas | Human Pancreas | Pancreas | | | Uni-ZAP XR |
| H0071 | Human Infant Adrenal | Human Infant Adrenal | Adrenal | | | Uni-ZAP XR |
| | Gland | Gland | gland | | | |
| H0073 | Human Leiomyeloid | Human Leiomyeloid | Muscle | | disease | Uni-ZAP XR |
| | Carcinoma | Carcinoma | | | | |
| H0075 | Human Activated T-Cells | Activated T-Cells | Blood | Cell Line | | Uni-ZAP XR |
| | (II) | | | | | |
| H0077 | Human Thymus Tumor | Human Thymus Tumor | Thymus | | disease | Lambda ZAP II |
| H0081 | Human Fetal Epithelium | Human Fetal Skin | Skin | | | Uni-ZAP XR |
| | (Skin) | | | | | |
| H0083 | HUMAN JURKAT | Jurkat Cells | | | | Uni-ZAP XR |
| | MEMBRANE BOUND | | | | | |
| | POLYSOMES | | | | | |
| H0085 | Human Colon | Human Colon | | | | Lambda ZAP II |
| H0086 | Human epithelioid sarcoma | Epithelioid | Sk Muscle | | disease | Uni-ZAP XR |
| | | Sarcoma, muscle | | | | |
| H0087 | Human Thymus | Human Thymus | | | | pBluescript |
| H0090 | Human T-Cell Lymphoma | T-Cell Lymphoma | T-Cell | | disease | Uni-ZAP XR |
| H0096 | Human Parotid Cancer | Human Parotid Cancer | Parotid | | disease | Lambda ZAP II |
| H0098 | Human Adult Liver, | Human Adult Liver | Liver | | | Uni-ZAP XR |
| | subtracted | | | | | |
| H0100 | Human Whole Six Week | Human Whole Six | Embryo | | | Uni-ZAP XR |
| | Old Embryo | Week Old Embryo | | | | |
| H0102 | Human Whole 6 Week Old | Human Whole Six | Embryo | | | pBluescript |
| | Embryo (II), subt | Week Old Embryo | | | | |
| H0108 | Human Adult Lymph | Human Adult Lymph Node | Lymph Node | | | Uni-ZAP XR |
| | Node, subtracted | | | | | |
| H0111 | Human Placenta, | Human Placenta | Placenta | | | pBluescript |
| | subtracted | | | | | |
| H0112 | Human Parathyroid Tumor, | Human Parathyroid Tumor, | Parathyroid | | | pBluescript |
| | subtracted | | | | | |
| H0122 | Human Adult Skeletal | Human Skeletal Muscle | Sk Muscle | | | Uni-ZAP XR |
| | Muscle | | | | | |
| H0123 | Human Fetal Dura Mater | Human Fetal Dura Mater | Brain | | | Uni-ZAP XR |
| H0124 | Human | Human | Sk Muscle | | disease | Uni-ZAP XR |
| | Rhabdomyosarcoma | Rhabdomyosarcoma | | | | |
| H0125 | Cem cells cyclohexamide | Cyclohexamide | Blood | Cell Line | | Uni-ZAP XR |
| | treated | Treated Cem, Jurkat, | | | | |
| | | Raji, and Supt | | | | |
| H0128 | Jurkat cells, thiouridine | Jurkat Cells | | | | Uni-ZAP XR |
| | activated, | | | | | |
| H0130 | LNCAP untreated | LNCAP Cell Line | Prostate | Cell Line | | Uni-ZAP XR |
| H0131 | LNCAP + o.3 nM R1881 | LNCAP Cell Line | Prostate | Cell Line | | Uni-ZAP XR |
| H0132 | LNCAP + 30 nM R1881 | LNCAP Cell Line | Prostate | Cell Line | | Uni-ZAP XR |
| H0134 | Raji Cells, cyclohexamide | Cyclohexamide | Blood | Cell Line | | Uni-ZAP XR |
| | treated | Treated Cem, Jurkat, | | | | |
| | | Raji, and Supt | | | | |
| H0135 | Human Synovial Sarcoma | Human Synovial Sarcoma | Synovium | | | Uni-ZAP XR |
| H0136 | Supt Cells, cyclohexamide | Cyclohexamide | Blood | Cell Line | | Uni-ZAP XR |
| | treated | Treated Cem, Jurkat, | | | | |
| | | Raji, and Supt | | | | |
| H0139 | Activated T-Cells, 4 hrs. | Activated T-Cells | Blood | Cell Line | | Uni-ZAP XR |
| H0140 | Activated T-Cells, 8 hrs. | Activated T-Cells | Blood | Cell Line | | Uni-ZAP XR |
| H0141 | Activated T-Cells, 12 hrs. | Activated T-Cells | Blood | Cell Line | | Uni-ZAP XR |
| H0144 | Nine Week Old Early | 9 Wk Old Early | Embryo | | | Uni-ZAP XR |
| | Stage Human | Stage Human | | | | |
| H0149 | 7 Week Old Early Stage | Human Whole 7 | Embryo | | | Uni-ZAP XR |
| | Human, subtracted | Week Old Embryo | | | | |
| H0150 | Human Epididymus | Epididymis | Testis | | | Uni-ZAP XR |
| H0151 | Early Stage Human Liver | Human Fetal Liver | Liver | | | Uni-ZAP XR |
| H0156 | Human Adrenal Gland | Human Adrenal Gland | Adrenal | | disease | Uni-ZAP XR |
| | Tumor | Tumor | Gland | | | |
| H0159 | Activated T-Cells, 8 hrs., | Activated T-Cells | Blood | Cell Line | | Uni-ZAP XR |
| | ligation 2 | | | | | |
| H0160 | Activated T-Cells, 12 hrs., | Activated T-Cells | Blood | Cell Line | | Uni-ZAP XR |
| | ligation 2 | | | | | |
| H0161 | Activated T-Cells, 24 hrs., | Activated T-Cells | Blood | Cell Line | | Uni-ZAP XR |
| | ligation 2 | | | | | |
| H0163 | Human Synovium | Human Synovium | Synovium | | | Uni-ZAP XR |
| H0165 | Human Prostate Cancer, | Human Prostate Cancer, | Prostate | | disease | Uni-ZAP XR |
| | Stage B2 | stage B2 | | | | |
| H0166 | Human Prostate Cancer, | Human Prostate Cancer, | Prostate | | disease | Uni-ZAP XR |
| | Stage B2 fraction | stage B2 | | | | |
| H0169 | Human Prostate Cancer, | Human Prostate Cancer, | Prostate | | disease | Uni-ZAP XR |
| | Stage C fraction | stage C | | | | |
| H0170 | 12 Week Old Early Stage | Twelve Week Old Early | Embryo | | | Uni-ZAP XR |
| | Human | Stage Human | | | | |
| H0171 | 12 Week Old Early Stage | Twelve Week Old Early | Embryo | | | Uni-ZAP XR |
| | Human, II | Stage Human | | | | |
| H0172 | Human Fetal Brain, | Human Fetal Brain | Brain | | | Lambda ZAP II |
| | random primed | | | | | |
| H0176 | CAMA1Ee Cell Line | CAMA1Ee Cell Line | Breast | Cell Line | | Uni-ZAP XR |
| H0177 | CAMA1Ee Cell Line | CAMA1Ee Cell Line | Breast | Cell Line | | Uni-ZAP XR |
| H0178 | Human Fetal Brain | Human Fetal Brain | Brain | | | Uni-ZAP XR |
| H0179 | Human Neutrophil | Human Neutrophil | Blood | Cell Line | | Uni-ZAP XR |
| H0180 | Human Primary Breast | Human Primary Breast | Breast | | disease | Uni-ZAP XR |
| | Cancer | Cancer | | | | |
| H0181 | Human Primary Breast | Human Primary Breast | Breast | | disease | Uni-ZAP XR |
| | Cancer | Cancer | | | | |
| H0182 | Human Primary Breast | Human Primary Breast | Breast | | disease | Uni-ZAP XR |
| | Cancer | Cancer | | | | |
| H0187 | Resting T-Cell | T-Cells | Blood | Cell Line | | Lambda ZAP II |
| H0188 | Human Normal Breast | Human Normal Breast | Breast | | | Uni-ZAP XR |
| H0192 | Cem Cells, cyclohexamide | Cyclohexamide | Blood | Cell Line | | Uni-ZAP XR |
| | treated, subtra | Treated Cem, Jurkat, | | | | |
| | | Raji, and Supt | | | | |
| H0194 | Human Cerebellum, | Human Cerebellum | Brain | | | pBluescript |
| | subtracted | | | | | |
| H0196 | Human Cardiomyopathy, | Human Cardiomyopathy | Heart | | | Uni-ZAP XR |
| | subtracted | | | | | |
| H0204 | Human Colon Cancer, | Human Colon Cancer | Colon | | | pBluescript |
| | subtracted | | | | | |
| H0208 | Early Stage Human Lung, | Human Fetal Lung | Lung | | | pBluescript |
| | subtracted | | | | | |
| H0211 | Human Prostate, differential | Human Prostate | Prostate | | | pBluescript |
| | expression | | | | | |
| H0212 | Human Prostate, subtracted | Human Prostate | Prostate | | | pBluescript |
| H0213 | Human Pituitary, | Human Pituitary | | | | Uni-ZAP XR |
| | subtracted | | | | | |
| H0214 | Raji cells, cyclohexamide | Cyclohexamide | Blood | Cell Line | | pBluescript |
| | treated, subtracted | Treated Cem, Jurkat, | | | | |
| | | Raji, and Supt | | | | |
| H0216 | Supt cells, cyclohexamide | Cyclohexamide | Blood | Cell Line | | pBluescript |
| | treated, subtracted | Treated Cem, Jurkat, | | | | |
| | | Raji, and Supt | | | | |
| H0218 | Activated T-Cells, 0 hrs, | Activated T-Cells | Blood | Cell Line | | Uni-ZAP XR |
| | subtracted | | | | | |
| H0220 | Activated T-Cells, 4 hrs, | Activated T-Cells | Blood | Cell Line | | Uni-ZAP XR |
| | subtracted | | | | | |
| H0224 | Activated T-Cells, 12 hrs, | Activated T-Cells | Blood | Cell Line | | Uni-ZAP XR |
| | subtracted | | | | | |
| H0225 | Activated T-Cells, 12 hrs, | Activated T-Cells | Blood | Cell Line | | Uni-ZAP XR |
| | differentially expressed | | | | | |
| H0231 | Human Colon, subtraction | Human Colon | | | | pBluescript |
| H0233 | Human Fetal Heart, | Human Fetal Heart | Heart | | | pBluescript |
| | Differential (Adult- | | | | | |
| | Specific) | | | | | |
| H0235 | Human colon cancer, | Human Colon Cancer, | Liver | | | pBluescript |
| | metaticized to liver, | metasticized to liver | | | | |
| | subtraction | | | | | |
| H0239 | Human Kidney Tumor | Human Kidney Tumor | Kidney | | disease | Uni-ZAP XR |
| H0240 | C7MCF7 cell line, estrogen | C7MCF7 Cell Line, | Breast | Cell Line | | Uni-ZAP XR |
| | treated, Differential | estrogen treated | | | | |
| H0242 | Human Fetal Heart, | Human Fetal Heart | Heart | | | pBluescript |
| | Differential (Fetal- | | | | | |
| | Specific) | | | | | |
| H0244 | Human 8 Week Whole | Human 8 Week Old | Embryo | | | Uni-ZAP XR |
| | Embryo, subtracted | Embryo | | | | |
| H0250 | Human Activated | Human Monocytes | | | | Uni-ZAP XR |
| | Monocytes | | | | | |
| H0251 | Human Chondrosarcoma | Human Chondrosarcoma | Cartilage | | disease | Uni-ZAP XR |
| H0252 | Human Osteosarcoma | Human Osteosarcoma | Bone | | disease | Uni-ZAP XR |
| H0253 | Human adult testis, large | Human Adult Testis | Testis | | | Uni-ZAP XR |
| | inserts | | | | | |
| H0254 | Breast Lymph node cDNA | Breast Lymph Node | Lymph Node | | | Uni-ZAP XR |
| | library | | | | | |
| H0255 | breast lymph node CDNA | Breast Lymph Node | Lymph Node | | | Lambda ZAP II |
| | library | | | | | |
| H0256 | HL-60, unstimulated | Human HL-60 Cells, | Blood | Cell Line | | Uni-ZAP XR |
| | | unstimulated | | | | |
| H0257 | HL-60, PMA 4 H | HL-60 Cells, PMA | Blood | Cell Line | | Uni-ZAP XR |
| | | stimulated 4 H | | | | |
| H0261 | H. cerebellum, Enzyme | Human Cerebellum | Brain | | | Uni-ZAP XR |
| | subtracted | | | | | |
| H0263 | human colon cancer | Human Colon Cancer | Colon | | disease | Lambda ZAP II |
| H0264 | human tonsils | Human Tonsil | Tonsil | | | Uni-ZAP XR |
| H0265 | Activated T-Cell | T-Cells | Blood | Cell Line | | Uni-ZAP XR |
| | (12 hs)/Thiouridine | | | | | |
| | labelledEco | | | | | |
| H0266 | Human Microvascular | HMEC | Vein | Cell Line | | Lambda ZAP II |
| | Endothelial Cells, fract. A | | | | | |
| H0267 | Human Microvascular | HMEC | Vein | Cell Line | | Lambda ZAP II |
| | Endothelial Cells, fract. B | | | | | |
| H0268 | Human Umbilical Vein | HUVE Cells | Umbilical | Cell Line | | Lambda ZAP II |
| | Endothelial Cells, fract. A | | vein | | | |
| H0269 | Human Umbilical Vein | HUVE Cells | Umbilical | Cell Line | | Lambda ZAP II |
| | Endothelial Cells, fract. B | | vein | | | |
| H0270 | HPAS (human pancreas, | Human Pancreas | Pancreas | | | Uni-ZAP XR |
| | subtracted) | | | | | |
| H0271 | Human Neutrophil, | Human Neutrophil - | Blood | Cell Line | | Uni-ZAP XR |
| | Activated | Activated | | | | |
| H0272 | HUMAN TONSILS, | Human Tonsil | Tonsil | | | Uni-ZAP XR |
| | FRACTION 2 | | | | | |
| H0274 | Human Adult Spleen, | Human Adult Spleen, | Spleen | | | Uni-ZAP XR |
| | fractionII | | | | | |
| H0275 | Human Infant Adrenal | Human Infant Adrenal | Adrenal | | | pBluescript |
| | Gland, Subtracted | Gland | gland | | | |
| H0280 | K562 + PMA (36 hrs) | K562 Cell line | cell line | Cell Line | | ZAP Express |
| H0284 | Human OB MG63 control | Human Osteoblastoma | Bone | Cell Line | | Uni-ZAP XR |
| | fraction I | MG63 cell line | | | | |
| H0286 | Human OB MG63 treated | Human Osteoblastoma | Bone | Cell Line | | Uni-ZAP XR |
| | (10 nM E2) fraction I | MG63 cell line | | | | |
| H0288 | Human OB HOS control | Human Osteoblastoma | Bone | Cell Line | | Uni-ZAP XR |
| | fraction I | HOS cell line | | | | |
| H0290 | Human OB HOS treated (1 nM | Human Osteoblastoma | Bone | Cell Line | | Uni-ZAP XR |
| | E2) fraction I | HOS cell line | | | | |
| H0292 | Human OB HOS treated | Human Osteoblastoma | Bone | Cell Line | | Uni-ZAP XR |
| | (10 nM E2) fraction I | HOS cell line | | | | |
| H0294 | Amniotic Cells - TNF | Amniotic Cells - TNF | Placenta | Cell Line | | Uni-ZAP XR |
| | induced | induced | | | | |
| H0295 | Amniotic Cells - Primary | Amniotic Cells - Primary | Placenta | Cell Line | | Uni-ZAP XR |
| | Culture | Culture | | | | |
| H0298 | HCBB''s differential | CAMA1Ee Cell Line | Breast | Cell Line | | Uni-ZAP XR |
| | consolidation | | | | | |
| H0300 | CD34 positive cells (Cord | CD34 Positive Cells | Cord Blood | | | ZAP Express |
| | Blood) | | | | | |
| H0305 | CD34 positive cells (Cord | CD34 Positive Cells | Cord Blood | | | ZAP Express |
| | Blood) | | | | | |
| H0306 | CD34 depleted Buffy Coat | CD34 Depleted Buffy Coat | Cord Blood | | | ZAP Express |
| | (Cord Blood) | (Cord Blood) | | | | |
| H0309 | Human Chronic Synovitis | Synovium, Chronic | Synovium | | disease | Uni-ZAP XR |
| | | Synovitis/Osteoarthritis | | | | |
| H0310 | human caudate nucleus | Brain | Brain | | | Uni-ZAP XR |
| H0313 | human pleural cancer | pleural cancer | | | disease | pBluescript |
| H0316 | HUMAN STOMACH | Human Stomach | Stomach | | | Uni-ZAP XR |
| H0318 | HUMAN B CELL | Human B Cell Lymphoma | Lymph Node | | disease | Uni-ZAP XR |
| | LYMPHOMA | | | | | |
| H0320 | Human frontal cortex | Human Frontal Cortex | Brain | | | Uni-ZAP XR |
| H0327 | human corpus colosum | Human Corpus Callosum | Brain | | | Uni-ZAP XR |
| H0328 | human ovarian cancer | Ovarian Cancer | Ovary | | disease | Uni-ZAP XR |
| H0329 | Dermatofibrosarcoma | Dermatofibrosarcoma | Skin | | disease | Uni-ZAP XR |
| | Protuberance | Protuberans | | | | |
| H0331 | Hepatocellular Tumor | Hepatocellular Tumor | Liver | | disease | Lambda ZAP II |
| H0333 | Hemangiopericytoma | Hemangiopericytoma | Blood vessel | | disease | Lambda ZAP II |
| H0334 | Kidney cancer | Kidney Cancer | Kidney | | disease | Uni-ZAP XR |
| H0341 | Bone Marrow Cell Line | Bone Marrow Cell | Bone | Cell Line | | Uni-ZAP XR |
| | (RS4; 11) | RS4; 11 | Marrow Line | | | |
| H0343 | stomach cancer (human) | Stomach Cancer - 5383A | | | disease | Uni-ZAP XR |
| | | (human) | | | | |
| H0346 | Brain-medulloblastoma | Brain (Medulloblastoma)- | Brain | | disease | Uni-ZAP XR |
| | | 9405C006R | | | | |
| H0350 | Human Fetal Liver, mixed | Human Fetal Liver, mixed | Liver | | | Uni-ZAP XR |
| | 10 & 14 week | 10&14 Week | | | | |
| H0351 | Glioblastoma | Glioblastoma | Brain | | disease | Uni-ZAP XR |
| H0352 | wilm''s tumor | Wilm''s Tumor | | | disease | Uni-ZAP XR |
| H0354 | Human Leukocytes | Human Leukocytes | Blood | Cell Line | | pCMVSport 1 |
| H0355 | Human Liver | Human Liver, normal Adult | | | | pCMVSport 1 |
| H0356 | Human Kidney | Human Kidney | Kidney | | | pCMVSport 1 |
| H0357 | H. Normalized Fetal Liver, | Human Fetal Liver | Liver | | | Uni-ZAP XR |
| | II | | | | | |
| H0359 | KMH2 cell line | KMH2 | | | | ZAP Express |
| H0369 | H. Atrophic Endometrium | Atrophic Endometrium and | | | | Uni-ZAP XR |
| | | myometrium | | | | |
| H0370 | H. Lymph node breast | Lymph node with Met. | | | disease | Uni-ZAP XR |
| | Cancer | Breast Cancer | | | | |
| H0373 | Human Heart | Human Adult Heart | Heart | | | pCMVSport 1 |
| H0375 | Human Lung | Human Lung | | | | pCMVSport 1 |
| H0379 | Human Tongue, frac 1 | Human Tongue | | | | pSport1 |
| H0380 | Human Tongue, frac 2 | Human Tongue | | | | pSport1 |
| H0381 | Bone Cancer | Bone Cancer | | | disease | Uni-ZAP XR |
| H0383 | Human Prostate BPH, re- | Human Prostate BPH | | | | Uni-ZAP XR |
| | excision | | | | | |
| H0384 | Brain, Kozak | Human Brain | | | | pCMVSport 1 |
| H0386 | Leukocyte and Lung; 4 | Hyman Leukocytes | Blood | Cell line | | pCMVSport 1 |
| | screens | | | | | |
| H0390 | Human Amygdala | Human Amygdala | | | disease | pBluescript |
| | Depression, re-excision | Depression | | | | |
| H0392 | H. Meningima, M1 | Human Meningima | brain | | | pSport1 |
| H0393 | Fetal Liver, subtraction II | Human Fetal Liver | Liver | | | pBluescript |
| H0394 | A-14 cell line | Redd-Sternberg cell | | | | ZAP Express |
| H0399 | Human Kidney Cortex, re- | Human Kidney Cortex | | | | Lambda ZAP II |
| | rescue | | | | | |
| H0402 | CD34 depleted Buffy Coat | CD34 Depleted Buffy Coat | Cord Blood | | | ZAP Express |
| | (Cord Blood), re-excision | (Cord Blood) | | | | |
| H0404 | H. Umbilical Vein | HUVE Cells | Umbilical | Cell Line | | Uni-ZAP XR |
| | endothelial cells, | | vein | | | |
| | uninduced | | | | | |
| H0405 | Human Pituitary, | Human Pituitary | | | | pBluescript |
| | subtracted VI | | | | | |
| H0406 | H Amygdala Depression, | Human Amygdala | | | | Uni-ZAP XR |
| | subtracted | Depression | | | | |
| H0408 | Human kidney Cortex, | Human Kidney Cortex | | | | pBluescript |
| | subtracted | | | | | |
| H0409 | H. Striatum Depression, | Human Brain, Striatum | Brain | | | pBluescript |
| | subtracted | Depression | | | | |
| H0410 | H. Male bladder, adult | H Male Bladder, Adult | Bladder | | | pSport1 |
| H0411 | H Female Bladder, Adult | Human Female Adult | Bladder | | | pSport1 |
| | | Bladder | | | | |
| H0412 | Human umbilical vein | HUVE Cells | Umbilical | Cell Line | | pSport1 |
| | endothelial cells, IL-4 | | vein | | | |
| | induced | | | | | |
| H0413 | Human Umbilical Vein | HUVE Cells | Umbilical | Cell Line | | pSport1 |
| | Endothelial Cells, | vein | | | | |
| | uninduced | | | | | |
| H0415 | H. Ovarian Tumor, II, | Ovarian Tumor, OV5232 | Ovary | | disease | pCMVSport 2.0 |
| | OV5232 | | | | | |
| H0416 | Human Neutrophils, | Human Neutrophil - | Blood | Cell Line | | pBluescript |
| | Activated, re-excision | Activated | | | | |
| H0417 | Human Pituitary, | Human Pituitary | | | | pBluescript |
| | subtracted VIII | | | | | |
| H0418 | Human Pituitary, | Human Pituitary | | | | pBluescript |
| | subtracted VII | | | | | |
| H0421 | Human Bone Marrow, re- | Bone Marrow | | | | pBluescript |
| | excision | | | | | |
| H0422 | T-Cell PHA 16 hrs | T-Cells | Blood | Cell Line | | pSport1 |
| H0423 | T-Cell PHA 24 hrs | T-Cells | Blood | Cell Line | | pSport1 |
| H0424 | Human Pituitary, subt IX | Human Pituitary | | | | pBluescript |
| H0427 | Human Adipose | Human Adipose, left | | | | pSport1 |
| | | hiplipoma | | | | |
| H0428 | Human Ovary | Human Ovary Tumor | Ovary | | | pSport1 |
| H0429 | K562 + PMA (36 hrs), re- | K562 Cell line | cell line | Cell Line | | ZAP Express |
| | excision | | | | | |
| H0431 | H. Kidney Medulla, re- | Kidney medulla | Kidney | | | pBluescript |
| | excision | | | | | |
| H0433 | Human Umbilical Vein | HUVE Cells | Umbilical | Cell Line | | pBluescript |
| | Endothelial cells, frac B, | | vein | | | |
| | re-excision | | | | | |
| H0435 | Ovarian Tumor 10-3-95 | Ovarian Tumor, OV350721 | Ovary | | | pCMVSport 2.0 |
| H0436 | Resting T-Cell Library, II | T-Cells | Blood | Cell Line | | pSport1 |
| H0437 | H Umbilical Vein | HUVE Cells | Umbilical | Cell Line | | Lambda ZAP II |
| | Endothelial Cells, frac A, | | vein | | | |
| | re-excision | | | | | |
| H0438 | H. Whole Brain #2, re- | Human Whole Brain #2 | | | | ZAP Express |
| | excision | | | | | |
| H0439 | Human Eosinophils | Eosinophils | | | | pBluescript |
| H0441 | H. Kidney Cortex, | Kidney cortex | Kidney | | | pBluescript |
| | subtracted | | | | | |
| H0444 | Spleen metastic melanoma | Spleen, Metastic malignant | Spleen | | disease | pSport1 |
| | | melanoma | | | | |
| H0445 | Spleen, Chronic | Human Spleen, CLL | Spleen | | disease | pSport1 |
| | lymphocytic leukemia | | | | | |
| H0449 | CD34+ cell, I | CD34 positive cells | | | | pSport1 |
| H0455 | H. Striatum Depression, | Human Brain, Striatum | Brain | | | pBluescript |
| | subt | Depression | | | | |
| H0457 | Human Eosinophils | Human Eosinophils | | | | pSport1 |
| H0458 | CD34+ cell, I, frac II | CD34 positive cells | | | | pSport1 |
| H0459 | CD34+cells, II, | CD34 positive cells | | | | pCMVSport 2.0 |
| | FRACTION 2 | | | | | |
| H0461 | H. Kidney Medulla, | Kidney medulla | Kidney | | | pBluescript |
| | subtracted | | | | | |
| H0477 | Human Tonsil, Lib 3 | Human Tonsil | Tonsil | | | pSport1 |
| H0478 | Salivary Gland, Lib 2 | Human Salivary Gland | Salivary | | | pSport1 |
| | | | gland | | | |
| H0483 | Breast Cancer cell line, | Breast Cancer Cell line, | | | | pSport1 |
| | MDA 36 | MDA 36 | | | | |
| H0484 | Breast Cancer Cell line, | Breast Cancer Cell line, | | | | pSport1 |
| | angiogenic | Angiogenic, 36T3 | | | | |
| H0485 | Hodgkin''s Lymphoma I | Hodgkin''s Lymphoma I | | | disease | pCMVSport 2.0 |
| H0486 | Hodgkin''s Lymphoma II | Hodgkin''s Lymphoma II | | | disease | pCMVSport 2.0 |
| H0488 | Human Tonsils, Lib 2 | Human Tonsils | | | | pCMVSport 2.0 |
| H0489 | Crohn''s Disease | Ileum | Intestine | | disease | pSport1 |
| H0492 | HL-60, RA 4 h, Subtracted | HL-60 Cells, RA stimulated | Blood | Cell Line | | Uni-ZAP XR |
| | | for 4 H | | | | |
| H0494 | Keratinocyte | Keratinocyte | | | | pCMVSport 2.0 |
| H0497 | HEL cell line | HEL cell line | | HEL | | pSport1 |
| | | | | 92.1.7 | | |
| H0505 | Human Astrocyte | Human Astrocyte | | | | pSport1 |
| H0506 | Ulcerative Colitis | Colon | Colon | | | pSport1 |
| H0509 | Liver, Hepatoma | Human Liver, Hepatoma, | Liver | | disease | pCMVSport 3.0 |
| | | patient 8 | | | | |
| H0510 | Human Liver, normal | Human Liver, normal, | Liver | | | pCMVSport 3.0 |
| | | Patient # 8 | | | | |
| H0518 | pBMC stimulated w/ poly | pBMC stimulated with poly | | | | pCMVSport 3.0 |
| | I/C | I/C | | | | |
| H0519 | NTERA2, control | NTERA2, Teratocarcinoma | | | | pCMVSport 3.0 |
| | | cell line | | | | |
| H0520 | NTERA2 + retinoic acid, | NTERA2, Teratocarcinoma | | | | pSport1 |
| | 14 days | cell line | | | | |
| H0521 | Primary Dendritic Cells, lib 1 | Primary Dendritic cells | | | | pCMVSport 3.0 |
| H0522 | Primary Dendritic | Primary Dendritic cells | | | | pCMVSport 3.0 |
| | cells, frac 2 | | | | | |
| H0525 | PCR, pBMC I/C treated | pBMC stimulated with poly | | | | PCRII |
| | | I/C | | | | |
| H0529 | Myoloid Progenitor Cell | TF-1 Cell Line; Myoloid | | | | pCMVSport 3.0 |
| | Line | progenitor cell line | | | | |
| H0530 | Human Dermal Endothelial | Human Dermal Endothelial | | | | pSport1 |
| | Cells, untreated | Cells; untreated | | | | |
| H0537 | H. Primary Dendritic | Primary Dendritic cells | | | | pCMVSport 2.0 |
| | Cells, lib 3 | | | | | |
| H0538 | Merkel Cells | Merkel cells | Lymph node | | | pSport1 |
| H0539 | Pancreas Islet Cell Tumor | Pancreas Islet Cell Tumour | Pancreas | | disease | pSport1 |
| H0542 | T Cell helper I | Helper T cell | | | | pCMVSport 3.0 |
| H0543 | T cell helper II | Helper T cell | | | | pCMVSport 3.0 |
| H0544 | Human endometrial | Human endometrial stromal | | | | pCMVSport 3.0 |
| | stromal cells | cells | | | | |
| H0545 | Human endometrial | Human endometrial stromal | | | | pCMVSport 3.0 |
| | stromal cells-treated with | cells-treated with proge | | | | |
| | progesterone | | | | | |
| H0546 | Human endometrial | Human endometrial stromal | | | | pCMVSport 3.0 |
| | stromal cells-treated with | cells-treated with estra | | | | |
| | estradiol | | | | | |
| H0547 | NTERA2 teratocarcinoma | NTERA2, Teratocarcinoma | | | | pSport1 |
| | cell line + retinoic acid (14 | cell line | | | | |
| | days) | | | | | |
| H0549 | H. Epididiymus, caput & | Human Epididiymus, caput | | | | Uni-ZAP XR |
| | corpus | and corpus | | | | |
| H0550 | H. Epididiymus, cauda | Human Epididiymus, cauda | | | | Uni-ZAP XR |
| H0551 | Human Thymus Stromal | Human Thymus Stromal | | | | pCMVSport 3.0 |
| | Cells | Cells | | | | |
| H0553 | Human Placenta | Human Placenta | | | | pCMVSport 3.0 |
| H0555 | Rejected Kidney, lib 4 | Human Rejected Kidney | Kidney | | disease | pCMVSport 3.0 |
| H0556 | Activated T- | T-Cells | Blood | Cell Line | | Uni-ZAP XR |
| | cell(12 h)/Thiouridine-re- | | | | | |
| | excision | | | | | |
| H0559 | HL-60, PMA 4 H, re- | HL-60 Cells, PMA | Blood | Cell Line | | Uni-ZAP XR |
| | excision | stimulated 4 H | | | | |
| H0560 | KMH2 | KMH2 | | | | pCMVSport 3.0 |
| H0561 | L428 | L428 | | | | pCMVSport 3.0 |
| H0563 | Human Fetal Brain, | Human Fetal Brain | | | | pCMVSport 2.0 |
| | normalized 50021F | | | | | |
| H0564 | Human Fetal Brain, | Human Fetal Brain | | | | pCMVSport 2.0 |
| | normalized C5001F | | | | | |
| H0566 | Human Fetal | Human Fetal Brain | | | | pCMVSport 2.0 |
| | Brain, normalized c50F | | | | | |
| H0567 | Human Fetal Brain, | Human Fetal Brain | | | | pCMVSport 2.0 |
| | normalized A5002F | | | | | |
| H0569 | Human Fetal Brain, | Human Fetal Brain | | | | pCMVSport 2.0 |
| | normalized CO | | | | | |
| H0570 | Human Fetal Brain, | Human Fetal Brain | | | | pCMVSport 2.0 |
| | normalized C500H | | | | | |
| H0571 | Human Fetal Brain, | Human Fetal Brain | | | | pCMVSport 2.0 |
| | normalized C500HE | | | | | |
| H0572 | Human Fetal Brain, | Human Fetal Brain | | | | pCMVSport 2.0 |
| | normalized AC5002 | | | | | |
| H0574 | Hepatocellular Tumor; re- | Hepatocellular Tumor | Liver | | disease | Lambda ZAP II |
| | excision | | | | | |
| H0575 | Human Adult | Human Adult Pulmonary | Lung | | | Uni-ZAP XR |
| | Pulmonary; re-excision | | | | | |
| H0576 | Resting T-Cell; re-excision | T-Cells | Blood | Cell Line | | Lambda ZAP II |
| H0578 | Human Fetal Thymus | Fetal Thymus | Thymus | | | pSport1 |
| H0580 | Dendritic cells, pooled | Pooled dendritic cells | | | | pCMVSport 3.0 |
| H0581 | Human Bone Marrow, | Human Bone Marrow | Bone | | | pCMVSport 3.0 |
| | treated | | Marrow | | | |
| H0583 | B Cell lymphoma | B Cell Lymphoma | B Cell | | disease | pCMVSport 3.0 |
| H0585 | Activated T-Cells, 12 hrs, | Activated T-Cells | Blood | Cell Line | | Uni-ZAP XR |
| | re-excision | | | | | |
| H0586 | Healing groin wound, 6.5 | healing groin wound, 6.5 | groin | | disease | pCMVSport 3.0 |
| | hours post incision | hours post incision - 2/ | | | | |
| H0587 | Healing groin wound; 7.5 | Groin-Feb. 19, 1997 | groin | | disease | pCMVSport 3.0 |
| | hours post incision | | | | | |
| H0589 | CD34 positive cells (cord | CD34 Positive Cells | Cord Blood | | | ZAP Express |
| | blood), re-ex | | | | | |
| H0590 | Human adult small | Human Adult Small | Small Int. | | | Uni-ZAP XR |
| | intestine, re-excision | Intestine | | | | |
| H0591 | Human T-cell | T-Cell Lymphoma | T-Cell | | disease | Uni-ZAP XR |
| | lymphoma; re-excision | | | | | |
| H0592 | Healing groin wound - zero | HGS wound healing | | | disease | pCMVSport 3.0 |
| | hr post-incision (control) | project; abdomen | | | | |
| H0593 | Olfactory | Olfactory epithelium from | | | | pCMVSport 3.0 |
| | epithelium; nasalcavity | roof of left nasal cacit | | | | |
| H0594 | Human Lung Cancer; re- | Human Lung Cancer | Lung | | disease | Lambda ZAP II |
| | excision | | | | | |
| H0595 | Stomach cancer | Stomach Cancer - 5383A | | | disease | Uni-ZAP XR |
| | (human); re-excision | (human) | | | | |
| H0596 | Human Colon Cancer; re- | Human Colon Cancer | Colon | | | Lambda ZAP II |
| | excision | | | | | |
| H0597 | Human Colon; re-excision | Human Colon | | | | Lambda ZAP II |
| H0598 | Human Stomach; re- | Human Stomach | Stomach | | | Uni-ZAP XR |
| | excision | | | | | |
| H0599 | Human Adult Heart; re- | Human Adult Heart | Heart | | | Uni-ZAP XR |
| | excision | | | | | |
| H0600 | Healing Abdomen | Abdomen | | | disease | pCMVSport 3.0 |
| | wound; 70&90 min post | | | | | |
| | incision | | | | | |
| H0601 | Healing Abdomen | Abdomen | | | disease | pCMVSport 3.0 |
| | Wound; 15 days post | | | | | |
| | incision | | | | | |
| H0604 | Human Pituitary, re- | Human Pituitary | | | | pBluescript |
| | excision | | | | | |
| H0606 | Human Primary Breast | Human Primary Breast | Breast | | disease | Uni-ZAP XR |
| | Cancer; re-excision | Cancer | | | | |
| H0610 | H. Leukocytes, normalized | H. Leukocytes | | | | pCMVSport 1 |
| | cot 5A | | | | | |
| H0611 | H. Leukocytes, normalized | H. Leukocytes | | | | pCMVSport 1 |
| | cot 500 B | | | | | |
| H0613 | H. Leukocytes, normalized | H. Leukocytes | | | | pCMVSport 1 |
| | cot 5B | | | | | |
| H0614 | H. Leucocytes, normalized | H. Leukocytes | | | | pCMVSport 1 |
| | cot 500 A | | | | | |
| H0615 | Human Ovarian Cancer | Ovarian Cancer | Ovary | | disease | Uni-ZAP XR |
| | Reexcision | | | | | |
| H0616 | Human Testes, Reexcision | Human Testes | Testis | | | Uni-ZAP XR |
| H0617 | Human Primary Breast | Human Primary Breast | Breast | | disease | Uni-ZAP XR |
| | Cancer Reexcision | Cancer | | | | |
| H0618 | Human Adult Testes, Large | Human Adult Testis | Testis | | | Uni-ZAP XR |
| | Inserts, Reexcision | | | | | |
| H0619 | Fetal Heart | Human Fetal Heart | Heart | | | Uni-ZAP XR |
| H0620 | Human Fetal Kidney; | Human Fetal Kidney | Kidney | | | Uni-ZAP XR |
| | Reexcision | | | | | |
| H0622 | Human Pancreas Tumor; | Human Pancreas Tumor | Pancreas | | disease | Uni-ZAP XR |
| | Reexcision | | | | | |
| H0623 | Human Umbilical Vein; | Human Umbilical Vein | Umbilical | | | Uni-ZAP XR |
| | Reexcision | Endothelial Cells | vein | | | |
| H0624 | 12 Week Early Stage | Twelve Week Old Early | Embryo | | | Uni-ZAP XR |
| | Human II; Reexcision | Stage Human | | | | |
| H0625 | Ku 812F Basophils Line | Ku 812F Basophils | | | | pSport1 |
| H0626 | Saos2 Cells; Untreated | Saos2 Cell Line; Untreated | | | | pSport1 |
| H0627 | Saos2 Cells; Vitamin D3 | Saos2 Cell Line; | | | | pSport1 |
| | Treated | Vitamin D3 Treated | | | | |
| H0628 | Human Pre-Differentiated | Human Pre-Differentiated | | | | Uni-ZAP XR |
| | Adipocytes | Adipocytes | | | | |
| H0631 | Saos2, Dexamethosome | Saos2 Cell Line; | | | | pSport1 |
| | Treated | Dexamethosome Treated | | | | |
| H0632 | Hepatocellular Tumor; re- | Hepatocellular Tumor | Liver | | | Lambda ZAP II |
| | excision | | | | | |
| H0633 | Lung Carcinoma A549 | TNFalpha activated | | | disease | pSport1 |
| | TNFalpha activated | A549 - Lung Carcinoma | | | | |
| H0634 | Human Testes Tumor, re- | Human Testes Tumor | Testis | | disease | Uni-ZAP XR |
| | excision | | | | | |
| H0635 | Human Activated T-Cells, | Activated T-Cells | Blood | Cell Line | | Uni-ZAP XR |
| | re-excision | | | | | |
| H0637 | Dendritic Cells From | Dentritic cells from CD34 | | | | pSport1 |
| | CD34 Cells | cells | | | | |
| H0638 | CD40 activated monocyte | CD40 activated monocyte | | | | pSport1 |
| | dendridic cells | dendridic cells | | | | |
| H0640 | Ficolled Human Stromal | Ficolled Human Stromal | | | | Other |
| | Cells, Untreated | Cells, Untreated | | | | |
| H0641 | LPS activated derived | LPS activated monocyte | | | | pSport1 |
| | dendritic cells | derived dendritic cells | | | | |
| H0642 | Hep G2 Cells, lambda | Hep G2 Cells | | | | Other |
| | library | | | | | |
| H0643 | Hep G2 Cells, PCR library | Hep G2 Cells | | | | Other |
| H0644 | Human Placenta (re- | Human Placenta | Placenta | | | Uni-ZAP XR |
| | excision) | | | | | |
| H0645 | Fetal Heart, re-excision | Human Fetal Heart | Heart | | | Uni-ZAP XR |
| H0646 | Lung, Cancer (4005313 | Metastatic squamous cell | | | | pSport1 |
| | A3): Invasive Poorly | lung carcinoma, poorly di | | | | |
| | Differentiated Lung | | | | | |
| | Adenocarcinoma, | | | | | |
| H0647 | Lung, Cancer (4005163 | Invasive poorly | | | disease | pSport1 |
| | B7): Invasive, Poorly Diff. | differentiated lung | | | | |
| | Adenocarcinoma, | adenocarcinoma | | | | |
| | Metastatic | | | | | |
| H0648 | Ovary, Cancer: (4004562 | Papillary Cstic neoplasm of | | | disease | pSport1 |
| | B6) Papillary Serous | low malignant potentia | | | | |
| | Cystic Neoplasm, Low | | | | | |
| | Malignant Pot | | | | | |
| H0649 | Lung, Normal: (4005313 | Normal Lung | | | | pSport1 |
| | B1) | | | | | |
| H0650 | B-Cells | B-Cells | | | | pCMVSport 3.0 |
| H0651 | Ovary, Normal: | Normal Ovary | | | | pSport1 |
| | (9805C040R) | | | | | |
| H0652 | Lung, Normal: (4005313 | Normal Lung | | | | pSport1 |
| | B1) | | | | | |
| H0653 | Stromal Cells | Stromal Cells | | | | pSport1 |
| H0656 | B-cells (unstimulated) | B-cells (unstimulated) | | | | pSport1 |
| H0657 | B-cells (stimulated) | B-cells (stimulated) | | | | pSport1 |
| H0658 | Ovary, Cancer | 9809C332 - Poorly | Ovary & | | disease | pSport1 |
| | (9809C332): Poorly | differentiate | Fallopian | | | |
| | differentiated | | Tubes | | | |
| | adenocarcinoma | | | | | |
| H0659 | Ovary, Cancer | Grade II Papillary | Ovary | | disease | pSport1 |
| | (15395A1F): Grade II | Carcinoma, Ovary | | | | |
| | Papillary Carcinoma | | | | | |
| H0660 | Ovary, Cancer: | Poorly differentiated | | | disease | pSport1 |
| | (15799A1F) Poorly | carcinoma, ovary | | | | |
| | differentiated carcinoma | | | | | |
| H0661 | Breast, Cancer: (4004943 | Breast cancer | | | disease | pSport1 |
| | A5) | | | | | |
| H0662 | Breast, Normal: | Normal Breast - | Breast | | | pSport1 |
| | (4005522B2) | #4005522(B2) | | | | |
| H0663 | Breast, Cancer: (4005522A2) | Breast Cancer - | Breast | | disease | pSport1 |
| | | #4005522(A2) | | | | |
| H0664 | Breast, Cancer: | Breast Cancer | Breast | | disease | pSport1 |
| | (9806C012R) | | | | | |
| H0665 | Stromal cells 3.88 | Stromal cells 3.88 | | | | pSport1 |
| H0666 | Ovary, Cancer: (4004332A2) | Ovarian Cancer, Sample | | | disease | pSport1 |
| | | #4004332A2 | | | | |
| H0667 | Stromal cells(HBM3.18) | Stromal cell(HBM 3.18) | | | | pSport1 |
| H0668 | stromal cell clone 2.5 | stromal cell clone 2.5 | | | | pSport1 |
| H0670 | Ovary, Cancer(4004650A3): | Ovarian Cancer - | | | | pSport1 |
| | Well-Differentiated | 4004650A3 | | | | |
| | Micropapillary Serous | | | | | |
| | Carcinoma | | | | | |
| H0672 | Ovary, Cancer: (4004576A8) | Ovarian Cancer | Ovary | | | pSport1 |
| | | (4004576A8) | | | | |
| H0673 | Human Prostate Cancer, | Human Prostate Cancer, | Prostate | | | Uni-ZAP XR |
| | Stage B2; re-excision | stage B2 | | | | |
| H0674 | Human Prostate Cancer, | Human Prostate Cancer, | Prostate | | | Uni-ZAP XR |
| | Stage C; re-excission | stage C | | | | |
| H0675 | Colon, Cancer: | Colon Cancer 9808C064R | | | | pCMVSport 3.0 |
| | (9808C064R) | | | | | |
| H0677 | TNFR degenerate oligo | B-Cells | | | | PCRII |
| H0678 | screened clones from | Placenta | Placenta | | | Other |
| | placental library | | | | | |
| H0682 | Serous Papillary | serous papillary | | | | pCMVSport 3.0 |
| | Adenocarcinoma | adenocarcinoma | | | | |
| | | (9606G304SPA3B) | | | | |
| H0683 | Ovarian Serous Papillary | Serous papillary | | | | pCMVSport 3.0 |
| | Adenocarcinoma | adenocarcinoma, stage 3C | | | | |
| | | (9804G01 | | | | |
| H0684 | Serous Papillary | Ovarian Cancer - | Ovaries | | | pCMVSport 3.0 |
| | Adenocarcinoma | 9810G606 | | | | |
| H0685 | Adenocarcinoma of Ovary, | Adenocarcinoma of Ovary, | | | | pCMVSport 3.0 |
| | Human Cell Line, # | Human Cell Line, | | | | |
| | OVCAR-3 | # OVCAR- | | | | |
| H0686 | Adenocarcinoma of Ovary, | Adenocarcinoma of Ovary, | | | | pCMVSport 3.0 |
| | Human Cell Line | Human Cell Line, | | | | |
| | | # SW-626 | | | | |
| H0687 | Human normal | Human normal | Ovary | | | pCMVSport 3.0 |
| | ovary(#9610G215) | ovary(#9610G215) | | | | |
| H0688 | Human Ovarian | Human Ovarian | | | | pCMVSport 3.0 |
| | Cancer(#9807G017) | cancer(#9807G017), | | | | |
| | | mRNA from Maura Ru | | | | |
| H0689 | Ovarian Cancer | Ovarian Cancer, | | | | pCMVSport 3.0 |
| | | #9806G019 | | | | |
| H0690 | Ovarian Cancer, # | Ovarian Cancer, | | | | pCMVSport 3.0 |
| | 9702G001 | #9702G001 | | | | |
| H0691 | Normal Ovary, #9710G208 | normal ovary, #9710G208 | | | | pCMVSport 3.0 |
| H0693 | Normal Prostate | Normal Prostate Tissue # | | | | pCMVSport 3.0 |
| | #ODQ3958EN | ODQ3958EN | | | | |
| H0694 | Prostate gland | Prostate gland, | prostate | | | pCMVSport 3.0 |
| | adenocarcinoma | adenocarcinoma, mod/diff, | gland | | | |
| | | gleason | | | | |
| H0695 | mononucleocytes from | mononucleocytes from | | | | pCMVSport 3.0 |
| | patient | patient at Shady Grove | | | | |
| | | Hospit | | | | |
| N0009 | Human Hippocampus, | Human Hippocampus | | | | |
| | prescreened | | | | | |
| S0001 | Brain frontal cortex | Brain frontal cortex | Brain | | | Lambda ZAP II |
| S0002 | Monocyte activated | Monocyte-activated | blood | Cell Line | | Uni-ZAP XR |
| S0003 | Human Osteoclastoma | Osteoclastoma | bone | | disease | Uni-ZAP XR |
| S0004 | Prostate | Prostate BPH | Prostate | | | Lambda ZAP II |
| S0005 | Heart | Heart-left ventricle | Heart | | | pCDNA |
| S0006 | Neuroblastoma | Human Neural Blastoma | | | disease | pCDNA |
| S0007 | Early Stage Human Brain | Human Fetal Brain | | | | Uni-ZAP XR |
| S0010 | Human Amygdala | Amygdala | | | | Uni-ZAP XR |
| S0011 | STROMAL - | Osteoclastoma | bone | | disease | Uni-ZAP XR |
| | OSTEOCLASTOMA | | | | | |
| S0014 | Kidney Cortex | Kidney cortex | Kidney | | | Uni-ZAP XR |
| S0015 | Kidney medulla | Kidney medulla | Kidney | | | Uni-ZAP XR |
| S0016 | Kidney Pyramids | Kidney pyramids | Kidney | | | Uni-ZAP XR |
| S0022 | Human Osteoclastoma | Osteoclastoma Stromal | | | | Uni-ZAP XR |
| | Stromal Cells - | Cells | | | | |
| | unamplified | | | | | |
| S0024 | Human Kidney Medulla - | Human Kidney Medulla | | | | |
| | unamplified | | | | | |
| S0026 | Stromal cell TF274 | stromal cell | Bone | Cell Line | | Uni-ZAP XR |
| | | | marrow | | | |
| S0027 | Smooth muscle, serum | Smooth muscle | Pulmanary | Cell Line | | Uni-ZAP XR |
| | treated | | artery | | | |
| S0028 | Smooth muscle, control | Smooth muscle | Pulmanary | Cell Line | | Uni-ZAP XR |
| | | | artery | | | |
| S0029 | brain stem | Brain stem | brain | | | Uni-ZAP XR |
| S0030 | Brain pons | Brain pons | Brain | | | Uni-ZAP XR |
| S0031 | Spinal cord | Spinal cord | spinal cord | | | Uni-ZAP XR |
| S0032 | Smooth muscle-ILb | Smooth muscle | Pulmanary | Cell Line | | Uni-ZAP XR |
| | induced | | artery | | | |
| S0036 | Human Substantia Nigra | Human Substantia Nigra | | | | Uni-ZAP XR |
| S0037 | Smooth muscle, IL1b | Smooth muscle | Pulmanary | Cell Line | | Uni-ZAP XR |
| | induced | | artery | | | |
| S0038 | Human Whole Brain #2 - | Human Whole Brain #2 | | | | ZAP Express |
| | Oligo dT >1.5 Kb | | | | | |
| S0039 | Hypothalamus | Hypothalamus | Brain | | | Uni-ZAP XR |
| S0040 | Adipocytes | Human Adipocytes from | | | | Uni-ZAP XR |
| | | Osteoclastoma | | | | |
| S0044 | Prostate BPH | prostate BPH | Prostate | | disease | Uni-ZAP XR |
| S0045 | Endothelial cells-control | Endothelial cell | endothelial | Cell Line | | Uni-ZAP XR |
| | | | cell-lung | | | |
| S0046 | Endothelial-induced | Endothelial cell | endothelial | Cell Line | | Uni-ZAP XR |
| | | | cell-lung | | | |
| S0048 | Human Hypothalamus, | Human Hypothalamus, | | | disease | Uni-ZAP XR |
| | Alzheimer''s | Alzheimer''s | | | | |
| S0049 | Human Brain, Striatum | Human Brain, Striatum | | | | Uni-ZAP XR |
| S0050 | Human Frontal Cortex, | Human Frontal Cortex, | | | disease | Uni-ZAP XR |
| | Schizophrenia | Schizophrenia | | | | |
| S0051 | Human | Human Hypothalamus, | | | disease | Uni-ZAP XR |
| | Hypothalmus, Schizophrenia | Schizophrenia | | | | |
| S0052 | neutrophils control | human neutrophils | blood | Cell Line | | Uni-ZAP XR |
| S0053 | Neutrophils IL-1 and LPS | human neutrophil induced | blood | Cell Line | | Uni-ZAP XR |
| | induced | | | | | |
| S0106 | STRIATUM | | BRAIN | | disease | Uni-ZAP XR |
| | DEPRESSION | | | | | |
| S0110 | Brain Amygdala | | Brain | | disease | Uni-ZAP XR |
| | Depression | | | | | |
| S0112 | Hypothalamus | | Brain | | | Uni-ZAP XR |
| S0114 | Anergic T-cell | Anergic T-cell | | Cell Line | | Uni-ZAP XR |
| S0116 | Bone marrow | Bone marrow | Bone | | | Uni-ZAP XR |
| | | | marrow | | | |
| S0122 | Osteoclastoma-normalized A | Osteoclastoma | bone | | disease | pBluescript |
| S0124 | Smooth muscle-edited A | Smooth muscle | Pulmanary | Cell Line | | Uni-ZAP XR |
| | | | artery | | | |
| S0126 | Osteoblasts | Osteoblasts | Knee | Cell Line | | Uni-ZAP XR |
| S0132 | Epithelial-TNFa and INF | Airway Epithelial | | | | Uni-ZAP XR |
| | induced | | | | | |
| S0134 | Apoptotic T-cell | apoptotic cells | | Cell Line | | Uni-ZAP XR |
| S0136 | PERM TF274 | stromal cell | Bone | Cell Line | | Lambda ZAP II |
| | | | marrow | | | |
| S0140 | eosinophil-IL5 induced | eosinophil | lung | Cell Line | | Uni-ZAP XR |
| S0142 | Macrophage-oxLDL | macrophage-oxidized LDL | blood | Cell Line | | Uni-ZAP XR |
| | | treated | | | | |
| S0144 | Macrophage (GM-CSF | Macrophage (GM-CSF | | | | Uni-ZAP XR |
| | treated) | treated) | | | | |
| S0146 | prostate-edited | prostate BPH | Prostate | | | Uni-ZAP XR |
| S0148 | Normal Prostate | Prostate | prostate | | | Uni-ZAP XR |
| S0150 | LNCAP prostate cell line | LNCAP Cell Line | Prostate | Cell Line | | Uni-ZAP XR |
| S0152 | PC3 Prostate cell line | PC3 prostate cell line | | | | Uni-ZAP XR |
| S0180 | Bone Marrow Stroma, | Bone Marrow Stroma, TNF | | | disease | Uni-ZAP XR |
| | TNF&LPS ind | & LPS induced | | | | |
| S0190 | Prostate BPH, Lib 2, | Human Prostate BPH | | | | pSport1 |
| | subtracted | | | | | |
| S0192 | Synovial Fibroblasts | Synovial Fibroblasts | | | | pSport1 |
| | (control) | | | | | |
| S0194 | Synovial hypoxia | Synovial Fibroblasts | | | | pSport1 |
| S0196 | Synovial IL-1/TNF | Synovial Fibroblasts | | | | pSport1 |
| | stimulated | | | | | |
| S0206 | Smooth Muscle-HASTE | Smooth muscle | Pulmanary | Cell Line | | pBluescript |
| | normalized | | artery | | | |
| S0210 | Messangial cell, frac 2 | Messangial cell | | | | pSport1 |
| S0212 | Bone Marrow Stromal | Bone Marrow Stromal | | | | pSport1 |
| | Cell, untreated | Cell, untreated | | | | |
| S0214 | Human Osteoclastoma, re- | Osteoclastoma | bone | | disease | Uni-ZAP XR |
| | excision | | | | | |
| S0216 | Neutrophils IL-1 and LPS | human neutrophil induced | blood | Cell Line | | Uni-ZAP XR |
| | induced | | | | | |
| S0218 | Apoptotic T-cell, re- | apoptotic cells | | Cell Line | | Uni-ZAP XR |
| | excision | | | | | |
| S0220 | H. hypothalamus, frac | Hypothalamus | Brain | | | ZAP Express |
| | A; re-excision | | | | | |
| S0222 | H. Frontal | H. Brain, Frontal Cortex, | Brain | | disease | Uni-ZAP XR |
| | cortex, epileptic; re-excision | Epileptic | | | | |
| S0242 | Synovial Fibroblasts | Synovial Fibroblasts | | | | pSport1 |
| | (Il1/TNF), subt | | | | | |
| S0250 | Human Osteoblasts II | Human Osteoblasts | Femur | | disease | pCMVSport 2.0 |
| S0260 | Spinal Cord, re-excision | Spinal cord | spinal cord | | | Uni-ZAP XR |
| S0276 | Synovial hypoxia-RSF | Synovial fobroblasts | Synovial | | | pSport1 |
| | subtracted | (rheumatoid) | tissue | | | |
| S0278 | H Macrophage (GM-CSF | Macrophage (GM-CSF | | | | Uni-ZAP XR |
| | treated), re-excision | treated) | | | | |
| S0280 | Human Adipose Tissue, re- | Human Adipose Tissue | | | | Uni-ZAP XR |
| | excision | | | | | |
| S0282 | Brain Frontal Cortex, re- | Brain frontal cortex | Brain | | | Lambda ZAP II |
| | excision | | | | | |
| S0294 | Larynx tumor | Larynx tumor | Larynx, | | disease | pSport1 |
| | | | cord | vocal | | |
| S0298 | Bone marrow | Bone marrow | Bone | | | pSport1 |
| | stroma, treated | stroma, treatedSB | marrow | | | |
| S0300 | Frontal lobe, dementia; re- | Frontal Lobe | Brain | | | Uni-ZAP XR |
| | excision | dementia/Alzheimer''s | | | | |
| S0312 | Human | Human osteoarthritic | | | disease | pSport1 |
| | osteoarthritic; fraction II | cartilage | | | | |
| S0314 | Human | Human osteoarthritic | | | disease | pSport1 |
| | osteoarthritis; fraction I | cartilage | | | | |
| S0328 | Palate carcinoma | Palate carcinoma | Uvula | | disease | pSport1 |
| S0330 | Palate normal | Palate normal | Uvula | | | pSport1 |
| S0332 | Pharynx carcinoma | Pharynx carcinoma | Hypo- | | | pSport1 |
| | | | pharynx | | | |
| S0334 | Human Normal Cartilage | Human Normal Cartilage | | | | pSport1 |
| | Fraction III | | | | | |
| S0336 | Human Normal Cartilage | Human Normal Cartilage | | | | pSport1 |
| | Fraction IV | | | | | |
| S0338 | Human Osteoarthritic | Human osteoarthritic | | | disease | pSport1 |
| | Cartilage Fraction III | cartilage | | | | |
| S0342 | Adipocytes; re-excision | Human Adipocytes from | | | | Uni-ZAP XR |
| | | Osteoclastoma | | | | |
| S0344 | Macrophage-oxLDL; re- | macrophage-oxidized LDL | blood | Cell Line | | Uni-ZAP XR |
| | excision | treated | | | | |
| S0346 | Human Amygdala; re- | Amygdala | | | | Uni-ZAP XR |
| | excision | | | | | |
| S0350 | Pharynx Carcinoma | Pharynx carcinoma | Hypo- | | disease | pSport1 |
| | | | pharynx | | | |
| S0354 | Colon Normal II | Colon Normal | Colon | | | pSport1 |
| S0356 | Colon Carcinoma | Colon Carcinoma | Colon | | disease | pSport1 |
| S0358 | Colon Normal III | Colon Normal | Colon | | | pSport1 |
| S0360 | Colon Tumor II | Colon Tumor | Colon | | disease | pSport1 |
| S0364 | Human Quadriceps | Quadriceps muscle | | | | pSport1 |
| S0366 | Human Soleus | Soleus Muscle | | | | pSport1 |
| S0368 | Human Pancreatic | Islets of Langerhans | | | | pSport1 |
| | Langerhans | | | | | |
| S0372 | Larynx carcinoma III | Larynx carcinoma | | | disease | pSport1 |
| S0374 | Normal colon | Normal colon | | | | pSport1 |
| S0376 | Colon Tumor | Colon Tumor | | | disease | pSport1 |
| S0378 | Pancreas normal PCA4 No | Pancreas Normal PCA4 No | | | | pSport1 |
| S0380 | Pancreas Tumor PCA4 Tu | Pancreas Tumor PCA4 Tu | | | disease | pSport1 |
| S0386 | Human Whole Brain, re- | Whole brain | Brain | | | ZAP Express |
| | excision | | | | | |
| S0388 | Human | Human Hypothalamus, | | | disease | Uni-ZAP XR |
| | Hypothalamus, schizophrenia, | Schizophrenia | | | | |
| | re-excision | | | | | |
| S0390 | Smooth muscle, control; | Smooth muscle | Pulmanary | Cell Line | | Uni-ZAP XR |
| | re-excision | | artery | | | |
| S0392 | Salivary Gland | Salivary gland; normal | | | | pSport1 |
| S0394 | Stomach; normal | Stomach; normal | | | | pSport1 |
| S0398 | Testis; normal | Testis; normal | | | | pSport1 |
| S0404 | Rectum normal | Rectum, normal | | | | pSport1 |
| S0406 | Rectum tumour | Rectum tumour | | | | pSport1 |
| S0408 | Colon, normal | Colon, normal | | | | pSport1 |
| S0410 | Colon, tumour | Colon, tumour | | | | pSport1 |
| S0412 | Temporal cortex- | Temporal cortex, alzheimer | | | disease | Other |
| | Alzheizmer; subtracted | | | | | |
| S0414 | Hippocampus, Alzheimer | Hippocampus, Alzheimer | | | | Other |
| | Subtracted | Subtracted | | | | |
| S0418 | CHME Cell Line; treated 5 hrs | CHME Cell Line; treated | | | | pCMVSport 3.0 |
| S0420 | CHME Cell Line untreated | CHME Cell line, untreated | | | | pSport1 |
| S0422 | Mo7e Cell Line GM-CSF | Mo7e Cell Line GM-CSF | | | | pCMVSport 3.0 |
| | treated (1 ng/ml) | treated (1 ng/ml) | | | | |
| S0424 | TF-1 Cell Line GM-CSF | TF-1 Cell Line GM-CSF | | | | pSport1 |
| | Treated | Treated | | | | |
| S0426 | Monocyte activated; re- | Monocyte-activated | blood | Cell Line | | Uni-ZAP XR |
| | excision | | | | | |
| S0428 | Neutrophils control; re- | human neutrophils | blood | Cell Line | | Uni-ZAP XR |
| | excision | | | | | |
| S0430 | Aryepiglottis Normal | Aryepiglottis Normal | | | | pSport1 |
| S0432 | Sinus piniformis Tumour | Sinus piniformis Tumour | | | | pSport1 |
| S0434 | Stomach Normal | Stomach Normal | | | disease | pSport1 |
| S0436 | Stomach Tumour | Stomach Tumour | | | disease | pSport1 |
| S0438 | Liver Normal Met5No | Liver Normal Met5No | | | | pSport1 |
| S0440 | Liver Tumour Met 5 Tu | Liver Tumour | | | | pSport1 |
| S0442 | Colon Normal | Colon Normal | | | | pSport1 |
| S0444 | Colon Tumor | Colon Tumour | | | disease | pSport1 |
| S0446 | Tongue Tumour | Tongue Tumour | | | | pSport1 |
| S0448 | Larynx Normal | Larynx Normal | | | | pSport1 |
| S0450 | Larynx Tumour | Larynx Tumour | | | | pSport1 |
| S0452 | Thymus | Thymus | | | | pSport1 |
| S0454 | Placenta | Placenta | Placenta | | | pSport1 |
| S0456 | Tongue Normal | Tongue Normal | | | | pSport1 |
| S0458 | Thyroid Normal (SDCA2 | Thyroid normal | | | | pSport1 |
| | No) | | | | | |
| S0460 | Thyroid Tumour | Thyroid Tumour | | | | pSport1 |
| S0462 | Thyroid Thyroiditis | Thyroid Thyroiditis | | | | pSport1 |
| S0470 | Adenocarcinoma | PYFD | | | disease | PSport1 |
| S0472 | Lung Mesothelium | PYBT | | | | pSport1 |
| S0474 | Human blood platelets | Platelets | Blood | | | Other |
| | | | platelets | | | |
| S0665 | Human Amygdala; re- | Amygdala | | | | Uni-ZAP XR |
| | excission | | | | | |
| S3012 | Smooth Muscle Serum | Smooth muscle | Pulmanary | Cell Line | | pBluescript |
| | Treated, Norm | | artery | | | |
| S3014 | Smooth muscle, serum | Smooth muscle | Pulmanary | Cell Line | | pBluescript |
| | induced, re-exc | | artery | | | |
| S6014 | H. hypothalamus, frac A | Hypothalamus | Brain | | | ZAP Express |
| S6022 | H. Adipose Tissue | Human Adipose Tissue | | | | Uni-ZAP XR |
| S6024 | Alzheimers, spongy change | Alzheimer''s/Spongy | Brain | | disease | Uni-ZAP XR |
| | | change | | | | |
| S6026 | Frontal Lobe, Dementia | Frontal Lobe | Brain | | | Uni-ZAP XR |
| | | dementia/Alzheimer''s | | | | |
| S6028 | Human Manic Depression | Human Manic depression | Brain | | disease | Uni-ZAP XR |
| | Tissue | tissue | | | | |
| T0002 | Activated T-cells | Activated T-Cell, PBL | Blood | Cell Line | | pBluescript SK− |
| | | fraction | | | | |
| T0004 | Human White Fat | Human White Fat | | | | pBluescript SK− |
| T0006 | Human Pineal Gland | Human Pinneal Gland | | | | pBluescript SK− |
| T0007 | Colon Epithelium | Colon Epithelium | | | | pBluescript SK− |
| T0008 | Colorectal Tumor | Colorectal Tumor | | | disease | pBluescript SK− |
| T0010 | Human Infant Brain | Human Infant Brain | | | | Other |
| T0023 | Human Pancreatic | Human Pancreatic | | | disease | pBluescript SK− |
| | Carcinoma | Carcinoma | | | | |
| T0039 | HSA 172 Cells | Human HSA172 cell line | | | | pBluescript SK− |
| T0040 | HSC172 cells | SA172 Cells | | | | pBluescript SK− |
| T0041 | Jurkat T-cell G1 phase | Jurkat T-cell | | | | pBluescript SK− |
| T0042 | Jurkat T-Cell, S phase | Jurkat T-Cell Line | | | | pBluescript SK− |
| T0048 | Human Aortic | Human Aortic Endothilium | | | | pBluescript SK− |
| | Endothelium | | | | | |
| T0049 | Aorta endothelial cells + TNF-a | Aorta endothelial cells | | | | pBluescript SK− |
| T0060 | Human White Adipose | Human White Fat | | | | pBluescript SK− |
| T0067 | Human Thyroid | Human Thyroid | | | | pBluescript SK− |
| T0068 | Normal Ovary, | Normal Ovary, | | | | pBluescript SK− |
| | Premenopausal | Premenopausal | | | | |
| T0069 | Human Uterus, normal | Human Uterus, normal | | | | pBluescript SK− |
| T0071 | Human Bone Marrow | Human Bone Marrow | | | | pBluescript SK− |
| T0082 | Human Adult Retina | Human Adult Retina | | | | pBluescript SK− |
| T0103 | Human colon carcinoma | | | | | pBluescript SK− |
| | (HCC) cell line | | | | | |
| T0104 | HCC cell line metastisis to | | | | | pBluescript SK− |
| | liver | | | | | |
| T0109 | Human (HCC) cell line | | | | | pBluescript SK− |
| | liver (mouse) metastasis, | | | | | |
| | remake | | | | | |
| T0110 | Human colon carcinoma | | | | | pBluescript SK− |
| | (HCC) cell line, remake | | | | | |
| T0114 | Human (Caco-2) cell line, | | | | | pBluescript SK− |
| | adenocarcinoma, colon, | | | | | |
| | remake | | | | | |
| T0115 | Human Colon Carcinoma | | | | | pBluescript SK− |
| | (HCC) cell line | | | | | |
| L0002 | Atrium cDNA library | | | | | |
| | Human heart | | | | | |
| L0005 | Clontech human aorta | | | | | |
| | polyA+ mRNA (#6572) | | | | | |
| L0015 | Human | | | | | |
| L0018 | Human (M. Lovett) | | | | | |
| L0021 | Human adult (K. Okubo) | | | | | |
| L0022 | Human adult lung 3″ | | | | | |
| | directed MboI cDNA | | | | | |
| L0041 | Human epidermal | | | | | |
| | keratinocyte | | | | | |
| L0045 | Human keratinocyte | | | | | |
| | differential display (B. Lin) | | | | | |
| L0053 | Human pancreatic tumor | | | | | |
| L0055 | Human promyelocyte | | | | | |
| L0060 | Human thymus NSTh II | | | | | |
| L0065 | Liver HepG2 cell line. | | | | | |
| L0070 | Selected chromosome 21 | | | | | |
| | cDNA library | | | | | |
| L0142 | Human placenta cDNA | placenta | | | | |
| | (TFujiwara) | | | | | |
| L0143 | Human placenta polyA+ | placenta | | | | |
| | (TFujiwara) | | | | | |
| L0157 | Human fetal brain | | brain | | | |
| | (TFujiwara) | | | | | |
| L0163 | Human heart cDNA | | heart | | | |
| | (YNakamura) | | | | | |
| L0183 | Human HeLa cells | | | HeLa | | |
| | (M. Lovett) | | | | | |
| L0194 | Human pancreatic cancer | pancreatic cancer | | Patu 8988t | | |
| | cell line Patu 8988t | | | | | |
| L0351 | Infant brain, Bento Soares | | | | | BA, M13-derived |
| L0352 | Normalized infant brain, | | | | | BA, M13-derived |
| | Bento Soares | | | | | |
| L0355 | P, Human foetal Brain | | | | | Bluescript |
| | Whole tissue | | | | | |
| L0356 | S, Human foetal Adrenals | | | | | Bluescript |
| | tissue | | | | | |
| L0361 | Stratagene ovary | | ovary | | | Bluescript SK |
| | (#937217) | | | | | |
| L0362 | Stratagene ovarian cancer | | | | | Bluescript SK− |
| | (#937219) | | | | | |
| L0363 | NCI_CGAP_GC2 | germ cell tumor | | | | Bluescript SK− |
| L0364 | NCI_CGAP_GC5 | germ cell tumor | | | | Bluescript SK− |
| L0366 | Stratagene schizo brain | schizophrenic brain S-11 | | | | Bluescript SK− |
| | S11 | frontal lobe | | | | |
| L0367 | NCI_CGAP_Sch1 | Schwannoma tumor | | | | Bluescript SK− |
| L0369 | NCI_CGAP_AA1 | adrenal adenoma | adrenal | | | Bluescript SK− |
| | | | gland | | | |
| L0370 | Johnston frontal cortex | pooled forntal lobe | brain | | | Bluescript SK− |
| L0371 | NCI_CGAP_Br3 | breast tumor | breast | | | Bluescript SK− |
| L0372 | NCI_CGAP_Co12 | colon tumor | colon | | | Bluescript SK− |
| L0373 | NCI_CGAP_Co11 | tumor | colon | | | Bluescript SK− |
| L0374 | NCI_CGAP_Co2 | tumor | colon | | | Bluescript SK− |
| L0375 | NCI_CGAP_Kid6 | kidney tumor | kidney | | | Bluescript SK− |
| L0376 | NCI_CGAP_Lar1 | larynx | larynx | | | Bluescript SK− |
| L0378 | NCI_CGAP_Lu1 | lung tumor | lung | | | Bluescript SK− |
| L0381 | NCI_CGAP_HN4 | squamous cell carcinoma | pharynx | | | Bluescript SK− |
| L0382 | NCI_CGAP_Pr25 | epithelium (cell line) | prostate | | | Bluescript SK− |
| L0383 | NCI_CGAP_Pr24 | invasive tumor (cell line) | prostate | | | Bluescript SK− |
| L0384 | NCI_CGAP_Pr23 | prostate tumor | prostate | | | Bluescript SK− |
| L0386 | NCI_CGAP_HN3 | squamous cell carcinoma | tongue | | | Bluescript SK− |
| | | from base of tongue | | | | |
| L0388 | NCI_CGAP_HN6 | normal gingiva (cell | | | | Bluescript SK− |
| | | line from immortalized | | | | |
| | | kerati | | | | |
| L0411 | 1-NIB | | | | | Lafmid BA |
| L0415 | b4HB3MA Cot8-HAP-Ft | | | | | Lafmid BA |
| L0435 | Infant brain, LLNL array | | | | | lafmid BA |
| | of Dr. M. Soares 1NIB | | | | | |
| L0438 | normalized infant brain | total brain | brain | | | lafmid BA |
| | cDNA | | | | | |
| L0439 | Soares infant brain 1NIB | | whole brain | | | Lafmid BA |
| L0454 | Clontech adult human fat | | | | | lambda gt10 |
| | cell library HL1108A | | | | | |
| L0455 | Human retina cDNA | retina | eye | | | lambda gt10 |
| | randomly primed | | | | | |
| | sublibrary | | | | | |
| L0456 | Human retina cDNA | retina | eye | | | lambda gt10 |
| | Tsp509I-cleaved sublibrary | | | | | |
| L0463 | fetal brain cDNA | brain | brain | | | lambda gt11 |
| L0465 | TEST1, Human adult | | | | | lambda nm1149 |
| | Testis tissue | | | | | |
| L0471 | Human fetal heart, Lambda | | | | | Lambda ZAP Express |
| | ZAP Express | | | | | |
| L0475 | KG1-a Lambda Zap | | | KG1-a | | Lambda Zap Express |
| | Express cDNA library | | | | | (Stratagene) |
| L0476 | Fetal brain, Stratagene | | | | | Lambda ZAP II |
| L0480 | Stratagene cat#937212 | | | | | Lambda ZAP, |
| | (1992) | | | | | pBluescript |
| | | | | | | SK(−) |
| L0481 | CD34+DIRECTIONAL | | | | | Lambda ZAPII |
| L0483 | Human pancreatic islet | | | | | Lambda ZAPII |
| L0485 | STRATAGENE Human | skeletal muscle | leg muscle | | | Lambda ZAPII |
| | skeletal muscle cDNA | | | | | |
| | library, cat. #936215. | | | | | |
| L0492 | Human Genomic | | | | | pAMP |
| L0493 | NCI_CGAP_Ov26 | papillary serous carcinoma | ovary | | | pAMP1 |
| L0497 | NCI_CGAP_HSC4 | CD34+, CD38− from | bone marrow | | | pAMP1 |
| | | normal bone | | | | |
| | | marrow donor | | | | |
| L0499 | NCI_CGAP_HSC2 | stem cell 34+/38+ | bone marrow | | | pAMP1 |
| L0500 | NCI_CGAP_Brn20 | oligodendroglioma | brain | | | pAMP1 |
| L0503 | NCI_CGAP_Br17 | adenocarcinoma | breast | | | pAMP1 |
| L0506 | NCI_CGAP_Br16 | lobullar carcinoma in situ | breast | | | pAMP1 |
| L0509 | NCI_CGAP_Lu26 | invasive adenocarcinoma | lung | | | pAMP1 |
| L0510 | NCI_CGAP_Ov33 | borderline ovarian | ovary | | | pAMP1 |
| | | carcinoma | | | | |
| L0511 | NCI_CGAP_Ov34 | borderline ovarian | ovary | | | pAMP1 |
| | | carcinoma | | | | |
| L0514 | NCI_CGAP_Ov31 | papillary serous carcinoma | ovary | | | pAMP1 |
| L0515 | NCI_CGAP_Ov32 | papillary serous carcinoma | ovary | | | pAMP1 |
| L0517 | NCI_CGAP_Pr1 | | | | | pAMP10 |
| L0518 | NCI_CGAP_Pr2 | | | | | pAMP10 |
| L0519 | NCI_CGAP_Pr3 | | | | | pAMP10 |
| L0520 | NCI_CGAP_Alv1 | alveolar rhabdomyosarcoma | | | | pAMP10 |
| L0521 | NCI_CGAP_Ew1 | Ewing''s sarcoma | | | | pAMP10 |
| L0522 | NCI_CGAP_Kid1 | kidney | | | | pAMP10 |
| L0523 | NCI_CGAP_Lip2 | liposarcoma | | | | pAMP10 |
| L0526 | NCI_CGAP_Pr12 | metastatic prostate bone | | | | pAMP10 |
| | | lesion | | | | |
| L0527 | NCI_CGAP_Ov2 | ovary | | | | pAMP10 |
| L0528 | NCI_CGAP_Pr5 | prostate | | | | pAMP10 |
| L0529 | NCI_CGAP_Pr6 | prostate | | | | pAMP10 |
| L0530 | NCI_CGAP_Pr8 | prostate | | | | pAMP10 |
| L0532 | NCI_CGAP_Thy1 | thyroid | | | | pAMP10 |
| L0533 | NCI_CGAP_HSC1 | stem cells | bone marrow | | | pAMP10 |
| L0534 | Chromosome 7 Fetal Brain | brain | brain | | | pAMP10 |
| | cDNA Library | | | | | |
| L0539 | Chromosome 7 Placental | | placenta | | | pAMP10 |
| | cDNA Library | | | | | |
| L0540 | NCI_CGAP_Pr10 | invasive prostate tumor | prostate | | | pAMP10 |
| L0542 | NCI_CGAP_Pr11 | normal prostatic epithelial | prostate | | | pAMP10 |
| | | cells | | | | |
| L0543 | NCI_CGAP_Pr9 | normal prostatic epithelial | prostate | | | pAMP10 |
| | | cells | | | | |
| L0544 | NCI_CGAP_Pr4 | prostatic intraepithelial | prostate | | | pAMP10 |
| | | neoplasia - high grade | | | | |
| L0545 | NCI_CGAP_Pr4.1 | prostatic intraepithelial | prostate | | | pAMP10 |
| | | neoplasia - high grade | | | | |
| L0553 | NCI_CGAP_Co22 | colonic adenocarcinoma | colon | | | pAMP10 |
| L0558 | NCI_CGAP_Ov40 | endometrioid ovarian | ovary | | | pAMP10 |
| | | metastasis | | | | |
| L0559 | NCI_CGAP_Ov39 | papillary serous ovarian | ovary | | | pAMP10 |
| | | metastasis | | | | |
| L0560 | NCI_CGAP_HN12 | moderate to poorly | tongue | | | pAMP10 |
| | | differentiated invasive | | | | |
| | | carcino | | | | |
| L0561 | NCI_CGAP_HN11 | normal squamous | tongue | | | pAMP10 |
| | | epithelium | | | | |
| L0562 | Chromosome 7 HeLa | | | HeLa cell | | pAMP10 |
| | cDNA Library | | | line; | | |
| | | | | ATCC | | |
| L0564 | Jia bone marrow stroma | bone marrow stroma | | | | pBluescript |
| L0565 | Normal Human Trabecular | Bone | Hip | | | pBluescript |
| | Bone Cells | | | | | |
| L0581 | Stratagene liver (#937224) | | liver | | | pBluescript SK |
| L0586 | HTCDL1 | | | | | pBluescript SK(−) |
| L0588 | Stratagene endothelial cell | | | | | pBluescript SK− |
| | 937223 | | | | | |
| L0589 | Stratagene fetal retina | | | | | pBluescript SK− |
| | 937202 | | | | | |
| L0590 | Stratagene fibroblast | | | | | pBluescript SK− |
| | (#937212) | | | | | |
| L0591 | Stratagene HeLa cell s3 | | | | | pBluescript SK− |
| | 937216 | | | | | |
| L0592 | Stratagene hNT neuron | | | | | pBluescript SK− |
| | (#937233) | | | | | |
| L0593 | Stratagene neuroepithelium | | | | | pBluescript SK− |
| | (#937231) | | | | | |
| L0594 | Stratagene neuroepithelium | | | | | pBluescript SK− |
| | NT2RAMI 937234 | | | | | |
| L0595 | Stratagene NT2 neuronal | neuroepithelial cells | brain | | | pBluescript SK− |
| | precursor 937230 | | | | | |
| L0596 | Stratagene colon (#937204) | | colon | | | pBluescript SK− |
| L0598 | Morton Fetal Cochlea | cochlea | ear | | | pBluescript SK− |
| L0599 | Stratagene lung (#937210) | | lung | | | pBluescript SK− |
| L0600 | Weizmann Olfactory | olfactory epithelium | nose | | | pBluescript SK− |
| | Epithelium | | | | | |
| L0601 | Stratagene pancreas | | pancreas | | | pBluescript SK− |
| | (#937208) | | | | | |
| L0602 | Pancreatic Islet | pancreatic islet | pancreas | | | pBluescript SK− |
| L0603 | Stratagene placenta | | placenta | | | pBluescript SK− |
| | (#937225) | | | | | |
| L0604 | Stratagene muscle 937209 | muscle | skeletal | | | pBluescript SK− |
| | | | muscle | | | |
| L0605 | Stratagene fetal spleen | fetal spleen | spleen | | | pBluescript SK− |
| | (#937205) | | | | | |
| L0606 | NCI_CGAP_Lym5 | follicular lymphoma | lymph node | | | pBluescript SK− |
| L0608 | Stratagene lung carcinoma | lung carcinoma | lung | NCI-H69 | | pBluescript SK− |
| | 937218 | | | | | |
| L0610 | Schiller glioblastoma | glibolastoma multiforme | brain | | | pBluescript SK− |
| | multiforme | | | | | (Stratagene) |
| L0611 | Schiller meningioma | meningioma | brain | | | pBluescript SK− |
| | | | | | | (Stratagene) |
| L0615 | 22 week old human fetal | | | | | pBluescriptII SK(−) |
| | liver cDNA library | | | | | |
| L0617 | Chromosome 22 exon | | | | | pBluescriptIIKS+ |
| L0622 | HM1 | | | | | pcDNAII (Invitrogen) |
| L0623 | HM3 | pectoral muscle (after | | | | pcDNAII (Invitrogen) |
| | | mastectomy) | | | | |
| L0625 | NCI_CGAP_AR1 | bulk alveolar tumor | | | | pCMV-SPORT2 |
| L0629 | NCI_CGAP_Mel3 | metastatic melanoma to | bowel (skin | | | pCMV-SPORT4 |
| | | bowel | primary) | | | |
| L0630 | NCI_CGAP_CNS1 | substantia nigra | brain | | | pCMV-SPORT4 |
| L0632 | NCI_CGAP_Li5 | hepatic adenoma | liver | | | pCMV-SPORT4 |
| L0633 | NCI_CGAP_Lu6 | small cell carcinoma | lung | | | pCMV-SPORT4 |
| L0634 | NCI_CGAP_Ov8 | serous adenocarcinoma | ovary | | | pCMV-SPORT4 |
| L0635 | NCI_CGAP_PNS1 | dorsal root ganglion | peripheral | | | pCMV-SPORT4 |
| | | | nervous | | | |
| | | | system | | | |
| L0636 | NCI_CGAP_Pit1 | four pooled pituitary | brain | | | pCMV-SPORT6 |
| | | adenomas | | | | |
| L0637 | NCI_CGAP_Brn53 | three pooled meningiomas | brain | | | pCMV-SPORT6 |
| L0638 | NCI_CGAP_Brn35 | tumor, 5 pooled (see | brain | | | pCMV-SPORT6 |
| | | description) | | | | |
| L0639 | NCI_CGAP_Brn52 | tumor, 5 pooled (see | brain | | | pCMV-SPORT6 |
| | | description) | | | | |
| L0640 | NCI_CGAP_Br18 | four pooled high-grade | breast | | | pCMV-SPORT6 |
| | | tumors, including | | | | |
| | | two prima | | | | |
| L0641 | NCI_CGAP_Co17 | juvenile granulosa tumor | colon | | | pCMV-SPORT6 |
| L0642 | NCI_CGAP_Co18 | moderately differentiated | colon | | | pCMV-SPORT6 |
| | | adenocarcinoma | | | | |
| L0643 | NCI_CGAP_Co19 | moderately differentiated | colon | | | pCMV-SPORT6 |
| | | adenocarcinoma | | | | |
| L0644 | NCI_CGAP_Co20 | moderately differentiated | colon | | | pCMV-SPORT6 |
| | | adenocarcinoma | | | | |
| L0645 | NCI_CGAP_Co21 | moderately differentiated | colon | | | pCMV-SPORT6 |
| | | adenocarcinoma | | | | |
| L0646 | NCI_CGAP_Co14 | moderately-differentiated | colon | | | pCMV-SPORT6 |
| | | adenocarcinoma | | | | |
| L0647 | NCI_CGAP_Sar4 | five pooled sarcomas, | connective | | | pCMV-SPORT6 |
| | | including myxoid | tissue | | | |
| | | liposarcoma | | | | |
| L0648 | NCI_CGAP_Eso2 | squamous cell carcinoma | esophagus | | | pCMV-SPORT6 |
| L0649 | NCI_CGAP_GU1 | 2 pooled high-grade | genitourinary | | | pCMV-SPORT6 |
| | | transitional cell tumors | tract | | | |
| L0650 | NCI_CGAP_Kid13 | 2 pooled Wilms'' | kidney | | | pCMV-SPORT6 |
| | | tumors, one primary | | | | |
| | | and one metast | | | | |
| L0651 | NCI_CGAP_Kid8 | renal cell tumor | kidney | | | pCMV-SPORT6 |
| L0652 | NCI_CGAP_Lu27 | four pooled poorly- | lung | | | pCMV-SPORT6 |
| | | differentiated | | | | |
| | | adenocarcinomas | | | | |
| L0653 | NCI_CGAP_Lu28 | two pooled squamous cell | lung | | | pCMV-SPORT6 |
| | | carcinomas | | | | |
| L0654 | NCI_CGAP_Lu31 | | lung, cell | | | pCMV-SPORT6 |
| | | | line | | | |
| L0655 | NCI_CGAP_Lym12 | lymphoma, follicular mixed | lymph node | | | pCMV-SPORT6 |
| | | small and large cell | | | | |
| L0656 | NCI_CGAP_Ov38 | normal epithelium | ovary | | | pCMV-SPORT6 |
| L0657 | NCI_CGAP_Ov23 | tumor, 5 pooled (see | ovary | | | pCMV-SPORT6 |
| | | description) | | | | |
| L0658 | NCI_CGAP_Ov35 | tumor, 5 pooled (see | ovary | | | pCMV-SPORT6 |
| | | description) | | | | |
| L0659 | NCI_CGAP_Pan1 | adenocarcinoma | pancreas | | | pCMV-SPORT6 |
| L0661 | NCI_CGAP_Mel15 | malignant melanoma, | skin | | | pCMV-SPORT6 |
| | | metastatic to lymph node | | | | |
| L0662 | NCI_CGAP_Gas4 | poorly differentiated | stomach | | | pCMV-SPORT6 |
| | | adenocarcinoma with | | | | |
| | | signet r | | | | |
| L0663 | NCI_CGAP_Ut2 | moderately-differentiated | uterus | | | pCMV-SPORT6 |
| | | endometrial adenocarcino | | | | |
| L0664 | NCI_CGAP_Ut3 | poorly-differentiated | uterus | | | pCMV-SPORT6 |
| | | endometrial | | | | |
| | | adenocarcinoma, | | | | |
| L0665 | NCI_CGAP_Ut4 | serous papillary carcinoma, | uterus | | | pCMV-SPORT6 |
| | | high grade, 2 pooled t | | | | |
| L0666 | NCI_CGAP_Ut1 | well-differentiated | uterus | | | pCMV-SPORT6 |
| | | endometrial | | | | |
| | | adenocarcinoma, 7 | | | | |
| L0667 | NCI_CGAP_CML1 | myeloid cells, 18 pooled | whole blood | | | pCMV-SPORT6 |
| | | CML cases, | | | | |
| | | BCR/ABL rearra | | | | |
| L0683 | Stanley Frontal NS pool 2 | frontal lobe (see | brain | | | pCR2.1-TOPO |
| | | description) | | | | (Invitrogen) |
| L0686 | Stanley Frontal SN pool 2 | frontal lobe (see | brain | | | pCR2.1-TOPO |
| | | description) | | | | (Invitrogen) |
| L0690 | Testis, Subtracted | | | | | pCRII |
| L0698 | Testis 2 | | | | | PGEM 5zf(+) |
| L0709 | NIH_MGC_21 | choriocarcinoma | placenta | | | pOTB7 |
| L0710 | NIH_MGC_7 | small cell carcinoma | lung | MGC3 | | pOTB7 |
| L0717 | Gessler Wilms tumor | | | | | pSPORT1 |
| L0718 | Testis 5 | | | | | pSPORT1 |
| L0731 | Soares_pregnant_uterus_NbHPU | | uterus | | | pT7T3-Pac |
| L0738 | Human colorectal cancer | | | | | pT7T3D |
| L0740 | Soares melanocyte 2NbHM | melanocyte | | | | pT7T3D (Pharmacia) |
| | | | | | | with a modified |
| | | | | | | polylinker |
| L0741 | Soares adult brain | | brain | | | pT7T3D (Pharmacia) |
| | N2b4HB55Y | | | | | with a modified |
| | | | | | | polylinker |
| L0742 | Soares adult brain | | brain | | | pT7T3D (Pharmacia) |
| | N2b5HB55Y | | | | | with a modified |
| | | | | | | polylinker |
| L0743 | Soares breast 2NbHBst | | breast | | | pT7T3D (Pharmacia) |
| | | | | | | with a modified |
| | | | | | | polylinker |
| L0744 | Soares breast 3NbHBst | | breast | | | pT7T3D (Pharmacia) |
| | | | | | | with a modified |
| | | | | | | polylinker |
| L0745 | Soares retina N2b4HR | retina | eye | | | pT7T3D (Pharmacia) |
| | | | | | | with a modified |
| | | | | | | polylinker |
| L0746 | Soares retina N2b5HR | retina | eye | | | pT7T3D (Pharmacia) |
| | | | | | | with a modified |
| | | | | | | polylinker |
| L0747 | Soares_fetal_heart_NbHH19W | | heart | | | pT7T3D (Pharmacia) |
| | | | | | | with a modified |
| | | | | | | polylinker |
| L0748 | Soares fetal liver spleen | | Liver and | | | pT7T3D (Pharmacia) |
| | 1NFLS | | Spleen | | | with a modified |
| | | | | | | polylinker |
| L0749 | Soares_fetal_liver_spleen_1NFLS_S1 | | Liver and | | | pT7T3D (Pharmacia) |
| | | | Spleen | | | with a modified |
| | | | | | | polylinker |
| L0750 | Soares_fetal_lung_NbHL19W | | lung | | | pT7T3D (Pharmacia) |
| | | | | | | with a modified |
| | | | | | | polylinker |
| L0751 | Soares ovary tumor | ovarian tumor | ovary | | | pT7T3D (Pharmacia) |
| | NbHOT | | | | | with a modified |
| | | | | | | polylinker |
| L0752 | Soares_parathyroid_tumor_NbHPA | parathyroid tumor | parathyroid | | | pT7T3D (Pharmacia) |
| | | | gland | | | with a modified |
| | | | | | | polylinker |
| L0753 | Soares_pineal_gland_N3HPG | | pineal gland | | | pT7T3D (Pharmacia) |
| | | | | | | with a modified |
| | | | | | | polylinker |
| L0754 | Soares placenta Nb2HP | | placenta | | | pT7T3D (Pharmacia) |
| | | | | | | with a modified |
| | | | | | | polylinker |
| L0755 | Soares_placenta_8to9weeks_2NbHP8to9W | | placenta | | | pT7T3D (Pharmacia) |
| | | | | | | with a modified |
| | | | | | | polylinker |
| L0756 | Soares_multiple_sclerosis_2NbHMSP | multiple sclerosis lesions | | | | pT7T3D (Pharmacia) |
| | | | | | | with a modified |
| | | | | | | polylinker |
| | | | | | | V_TYPE |
| L0757 | Soares_senescent_fibroblasts_NbHSF | senescent fibroblast | | | | pT7T3D (Pharmacia) |
| | | | | | | with a modified |
| | | | | | | polylinker |
| | | | | | | V_TYPE |
| L0758 | Soares_testis_NHT | | | | | pT7T3D-Pac (Pharmacia) |
| | | | | | | with a modified |
| | | | | | | polylinker |
| L0759 | Soares_total_fetus_Nb2HF8_9w | | | | | pT7T3D-Pac (Pharmacia) |
| | | | | | | with a modified |
| | | | | | | polylinker |
| L0761 | NCI_CGAP_CLL1 | B-cell, chronic lymphotic | | | | pT7T3D-Pac (Pharmacia) |
| | | leukemia | | | | with a modified |
| | | | | | | polylinker |
| L0762 | NCI_CGAP_Br1.1 | breast | | | | pT7T3D-Pac (Pharmacia) |
| | | | | | | with a modified |
| | | | | | | polylinker |
| L0763 | NCI_CGAP_Br2 | breast | | | | pT7T3D-Pac (Pharmacia) |
| | | | | | | with a modified |
| | | | | | | polylinker |
| L0764 | NCI_CGAP_Co3 | colon | | | | pT7T3D-Pac (Pharmacia) |
| | | | | | | with a modified |
| | | | | | | polylinker |
| L0766 | NCI_CGAP_GCB1 | germinal center B cell | | | | pT7T3D-Pac (Pharmacia) |
| | | | | | | with a modified |
| | | | | | | polylinker |
| L0767 | NCI_CGAP_GC3 | pooled germ cell tumors | | | | pT7T3D-Pac (Pharmacia) |
| | | | | | | with a modified |
| | | | | | | polylinker |
| L0768 | NCI_CGAP_GC4 | pooled germ cell tumors | | | | pT7T3D-Pac (Pharmacia) |
| | | | | | | with a modified |
| | | | | | | polylinker |
| L0769 | NCI_CGAP_Brn25 | anaplastic | brain | | | pT7T3D-Pac (Pharmacia) |
| | | oligodendroglioma | | | | with a modified |
| | | | | | | polylinker |
| L0770 | NCI_CGAP_Brn23 | glioblastoma (pooled) | brain | | | pT7T3D-Pac (Pharmacia) |
| | | | | | | with a modified |
| | | | | | | polylinker |
| L0771 | NCI_CGAP_Co8 | adenocarcinoma | colon | | | pT7T3D-Pac (Pharmacia) |
| | | | | | | with a modified |
| | | | | | | polylinker |
| L0772 | NCI_CGAP_Co10 | colon tumor RER+ | colon | | | pT7T3D-Pac (Pharmacia) |
| | | | | | | with a modified |
| | | | | | | polylinker |
| L0773 | NCI_CGAP_Co9 | colon tumor RER+ | colon | | | pT7T3D-Pac (Pharmacia) |
| | | | | | | with a modified |
| | | | | | | polylinker |
| L0774 | NCI_CGAP_Kid3 | | kidney | | | pT7T3D-Pac (Pharmacia) |
| | | | | | | with a modified |
| | | | | | | polylinker |
| L0775 | NCI_CGAP_Kid5 | 2 pooled tumors (clear cell | kidney | | | pT7T3D-Pac (Pharmacia) |
| | | type) | | | | with a modified |
| | | | | | | polylinker |
| L0776 | NCI_CGAP_Lu5 | carcinoid | lung | | | pT7T3D-Pac (Pharmacia) |
| | | | | | | with a modified |
| | | | | | | polylinker |
| L0777 | Soares_NhHMPu_S1 | Pooled human melanocyte, | mixed (see | | | pT7T3D-Pac (Pharmacia) |
| | | fetal heart, and pregnant | below) | | | with a modified |
| | | | | | | polylinker |
| L0779 | Soares_NFL_T_GBC_S1 | | pooled | | | pT7T3D-Pac (Pharmacia) |
| | | | | | | with a modified |
| | | | | | | polylinker |
| L0780 | Soares_NSF_F8_9W_OT_PA_P_S1 | | pooled | | | pT7T3D-Pac (Pharmacia) |
| | | | | | | with a modified |
| | | | | | | polylinker |
| L0782 | NCI_CGAP_Pr21 | normal prostate | prostate | | | pT7T3D-Pac (Pharmacia) |
| | | | | | | with a modified |
| | | | | | | polylinker |
| L0783 | NCI_CGAP_Pr22 | normal prostate | prostate | | | pT7T3D-Pac (Pharmacia) |
| | | | | | | with a modified |
| | | | | | | polylinker |
| L0784 | NCI_CGAP_Lei2 | leiomyosarcoma | soft tissue | | | pT7T3D-Pac (Pharmacia) |
| | | | | | | with a modified |
| | | | | | | polylinker |
| L0785 | Barstead spleen HPLRB2 | | spleen | | | pT7T3D-Pac (Pharmacia) |
| | | | | | | with a modified |
| | | | | | | polylinker |
| L0786 | Soares_NbHFB | | whole brain | | | pT7T3D-Pac (Pharmacia) |
| | | | | | | with a modified |
| | | | | | | polylinker |
| L0787 | NCI_CGAP_Sub1 | | | | | pT7T3D-Pac (Pharmacia) |
| | | | | | | with a modified |
| | | | | | | polylinker |
| L0788 | NCI_CGAP_Sub2 | | | | | pT7T3D-Pac (Pharmacia) |
| | | | | | | with a modified |
| | | | | | | polylinker |
| L0789 | NCI_CGAP_Sub3 | | | | | pT7T3D-Pac (Pharmacia) |
| | | | | | | with a modified |
| | | | | | | polylinker |
| L0790 | NCI_CGAP_Sub4 | | | | | pT7T3D-Pac (Pharmacia) |
| | | | | | | with a modified |
| | | | | | | polylinker |
| L0791 | NCI_CGAP_Sub5 | | | | | pT7T3D-Pac (Pharmacia) |
| | | | | | | with a modified |
| | | | | | | polylinker |
| L0792 | NCI_CGAP_Sub6 | | | | | pT7T3D-Pac (Pharmacia) |
| | | | | | | with a modified |
| | | | | | | polylinker |
| L0793 | NCI_CGAP_Sub7 | | | | | pT7T3D-Pac (Pharmacia) |
| | | | | | | with a modified |
| | | | | | | polylinker |
| L0794 | NCI_CGAP_GC6 | pooled germ cell tumors | | | | pT7T3D-Pac (Pharmacia) |
| | | | | | | with a modified |
| | | | | | | polylinker |
| L0796 | NCI_CGAP_Brn50 | medulloblastoma | brain | | | pT7T3D-Pac (Pharmacia) |
| | | | | | | with a modified |
| | | | | | | polylinker |
| L0800 | NCI_CGAP_Co16 | colon tumor, RER+ | colon | | | pT7T3D-Pac (Pharmacia) |
| | | | | | | with a modified |
| | | | | | | polylinker |
| L0803 | NCI_CGAP_Kid11 | | kidney | | | pT7T3D-Pac (Pharmacia) |
| | | | | | | with a modified |
| | | | | | | polylinker |
| L0804 | NCI_CGAP_Kid12 | 2 pooled tumors (clear cell | kidney | | | pT7T3D-Pac (Pharmacia) |
| | | type) | | | | with a modified |
| | | | | | | polylinker |
| L0805 | NCI_CGAP_Lu24 | carcinoid | lung | | | pT7T3D-Pac (Pharmacia) |
| | | | | | | with a modified |
| | | | | | | polylinker |
| L0806 | NCI_CGAP_Lu19 | squamous cell carcinoma, | lung | | | pT7T3D-Pac (Pharmacia) |
| | | poorly differentiated (4 | | | | with a modified |
| | | | | | | polylinker |
| L0807 | NCI_CGAP_Ov18 | fibrotheoma | ovary | | | pT7T3D-Pac (Pharmacia) |
| | | | | | | with a modified |
| | | | | | | polylinker |
| L0809 | NCI_CGAP_Pr28 | | prostate | | | pT7T3D-Pac (Pharmacia) |
| | | | | | | with a modified |
| | | | | | | polylinker |
| L0811 | BATM2 | | | | | PTZ18 |
| L0879 | BT0254 | | breast | | | puc18 |
| L0946 | BT0333 | | breast | | | puc18 |
| L1441 | CT0249 | | colon | | | puc18 |
| L1499 | CT0322 | | colon | | | puc18 |
| L1788 | HT0229 | | head_neck | | | puc18 |
| L1877 | HT0340 | | head_neck | | | puc18 |
| L1942 | HT0452 | | head_neck | | | puc18 |
| L2251 | Human fetal lung | Fetal lung | | | | |
| L2255 | GLC | corresponding non | | | | pBluescript sk(−) |
| | cancerous | liver tissue | | | | |
| L2257 | NIH_MGC_65 | adenocarcinoma | colon | | | pCMV-SPORT6 |
| L2258 | NIH_MGC_67 | retinoblastoma | eye | | | pCMV-SPORT6 |
| L2259 | NIH_MGC_68 | large cell carcinoma | lung | | | pCMV-SPORT6 |
| L2260 | NIH_MGC_69 | large cell carcinoma, | lung | | | pCMV-SPORT6 |
| | | undifferentiated | | | | |
| L2261 | NIH_MGC_70 | epithelioid carcinoma | pancreas | | | pCMV-SPORT6 |
| L2262 | NIH_MGC_72 | melanotic melanoma | skin | | | pCMV-SPORT6 |
| L2263 | NIH_MGC_66 | adenocarcinoma | ovary | | | pCMV-SPORT6 |
| L2265 | NIH_MGC_39 | adenocarcinoma | pancreas | | | pOTB7 |
| L2270 | Lupski_dorsal_root_ganglion | dorsal root ganglia | | | | pCMV-SPORT6 (Life |
| | | | | | | Technologies) |
| L2281 | BT0701 | | breast | | | puc18 |
| L2333 | CT0417 | | colon | | | puc18 |
| L2338 | CT0432 | | colon | | | puc18 |
| L2346 | CT0483 | | colon | | | puc18 |
| L2439 | NN1022 | | nervous_normal | | | puc18 |
| L2440 | NN1023 | | nervous_normal | | | puc18 |
| L2467 | NN1112 | | nervous_normal | | | puc18 |
| L2477 | HT0408 | | head_neck | | | puc18 |
| L2490 | HT0545 | | head_neck | | | puc18 |
| L2491 | HT0559 | | head_neck | | | puc18 |
| L2495 | HT0594 | | head_neck | | | puc18 |
| L2504 | HT0636 | | head_neck | | | puc18 |
| L2522 | HT0704 | | head_neck | | | puc18 |
| L2539 | HT0727 | | head_neck | | | puc18 |
| L2540 | HT0728 | | head_neck | | | puc18 |
| L2562 | HT0760 | | head_neck | | | puc18 |
| L2599 | HT0810 | | head_neck | | | puc18 |
| L2634 | HT0872 | | head_neck | | | puc18 |
| L2637 | HT0877 | | head_neck | | | puc18 |
| L2651 | NIH_MGC_20 | melanotic melanoma | skin | | | pOTB7 |
| L2653 | NIH_MGC_58 | hypernephroma | kidney | | | pDNR-LIB (Clontech) |
| L2654 | NIH_MGC_9 | adenocarcinoma cell line | ovary | | | pOTB7 |
| L2655 | NIH_MGC_55 | from acute myelogenous | bone marrow | | | pDNR-LIB (Clontech) |
| | | leukemia | | | | |
| L2657 | NIH_MGC_54 | from chronic myelogenous | bone marrow | | | pDNR-LIB (Clontech) |
| | | leukemia | | | | |
| L2681 | NT0048 | | nervous_tumor | | | puc18 |
| L2702 | NT0098 | | nervous_tumor | | | puc18 |
| L2716 | NT0117 | | nervous_tumor | | | puc18 |
| L2814 | FT0128 | | prostate_tumor | | | puc18 |
| L2817 | FT0131 | | prostate_tumor | | | puc18 |
| L2842 | UM0009 | | uterus | | | puc18 |
| L2852 | UM0077 | | uterus | | | puc18 |
| L2854 | UM0091 | | uterus | | | puc18 |
| L2865 | AN0004 | | amnion_normal | | | puc18 |
| L2884 | AN0041 | | amnion_normal | | | puc18 |
| L2902 | BN0036 | | breast_normal | | | puc18 |
| L2905 | BN0046 | | breast_normal | | | puc18 |
| L2906 | BN0047 | | breast_normal | | | puc18 |
| L2918 | BN0114 | | breast_normal | | | puc18 |
| L2919 | BN0115 | | breast_normal | | | puc18 |
| L3002 | BN0276 | | breast_normal | | | puc18 |
| L3058 | EN0004 | | lung_normal | | | puc18 |
| L3081 | ET0005 | | lung_tumor | | | puc18 |
| L3089 | ET0018 | | lung_tumor | | | puc18 |
| L3092 | ET0023 | | lung_tumor | | | puc18 |
| L3127 | ET0084 | | lung_tumor | | | puc18 |
| L3144 | MT0035 | | marrow | | | puc18 |
| L3154 | MT0050 | | marrow | | | puc18 |
| L3212 | OT0076 | | ovary | | | puc18 |
| L3255 | FN0064 | | prostate_normal | | | puc18 |
| L3311 | FN0180 | | prostate_normal | | | puc18 |
| L3312 | FN0181 | | prostate_normal | | | puc18 |
| L3316 | FN0188 | | prostate_normal | | | puc18 |
| L3327 | SN0024 | | stomach_normal | | | puc18 |
| L3330 | SN0041 | | stomach_normal | | | puc18 |
| L3352 | TN0027 | | testis_normal | | | puc18 |
| L3374 | TN0070 | | testis_normal | | | puc18 |
| L3378 | TN0080 | | testis_normal | | | puc18 |
| L3388 | GKC | hepatocellular carcinoma | | | | pBluescript sk(−) |
| L3391 | NIH_MGC_53 | carcinoma, cell line | bladder | | | pDNR-LIB Clontech |
| L3403 | AN0087 | | amnion_normal | | | puc18 |
| L3432 | CT0461 | | colon | | | puc18 |
| L3466 | GN0020 | | placenta_normal | | | puc18 |
| L3485 | GN0070 | | placenta_normal | | | puc18 |
| L3504 | HT0873 | | head_neck | | | puc18 |
| L3506 | HT0879 | | head_neck | | | puc18 |
| L3521 | HT0919 | | head_neck | | | puc18 |
| L3530 | HT0939 | | head_neck | | | puc18 |
| L3603 | UM0093 | | uterus | | | puc18 |
| L3612 | UT0011 | | uterus_tumor | | | puc18 |
| L3631 | UT0072 | | uterus_tumor | | | puc18 |
| L3636 | NIH_MGC_73 | | brain | | | pDNR-LIB (Clontech) |
| L3643 | ADB | Adrenal gland | | | | pBluescript sk(−) |
| L3644 | ADC | Adrenal gland | | | | pBluescript sk(−) |
| L3645 | Cu | adrenal cortico adenoma for | | | | pBluescript sk(−) |
| | | Cushing''s syndrome | | | | |
| L3649 | DCB | | | | | pTriplEx2 |
| L3653 | HTB | Hypothalamus | | | | pBluescript sk(−) |
| L3655 | HTC | Hypothalamus | | | | pBluescript sk(−) |
| L3657 | HTF | Hypothalamus | | | | pBluescript sk(−) |
| L3658 | cdA | pheochromocytoma | | | | pTriplEx2 |
| L3659 | CB | cord blood | | | | pBluescript |
| L3684 | BT0812 | | breast | | | puc18 |
| L3722 | GN0030 | | placenta_normal | | | puc18 |
| L3811 | NPC | pituitary | | | | pBluescript sk(−) |
| L3813 | TP | pituitary tumor | | | | pTriplEx2 |
| L3814 | BM | Bone marrow | | | | pTriplEx2 |
| L3815 | MDS | Bone marrow | | | | pTriplEx2 |
| L3816 | HEMBA1 | whole embryo, mainly head | | | | pME18SFL3 |
| L3817 | HEMBB1 | whole embryo, mainly body | | | | pME18SFL3 |
| L3823 | NT2RM1 | | | NT2 | | pUC19FL3 |
| L3826 | NT2RP1 | | | NT2 | | pUC19FL3 |
| L3827 | NT2RP2 | | | NT2 | | PME18SFL3 |
| L3828 | NT2RP3 | | | NT2 | | PME18SFL3 |
| L3829 | NT2RP4 | | | NT2 | | PME18SFL3 |
| L3831 | OVARC1 | ovary, tumor tissue | | | | PME18SFL3 |
| L3832 | PLACE1 | placenta | | | | pME18SFL3 |
| L3833 | PLACE2 | placenta | | | | pME18SFL3 |
| L3872 | NCI_CGAP_Skn1 | | skin, normal, 4 | | | pCMV-SPORT6 |
| | | | pooled sa | | | |
| L3904 | NCI_CGAP_Brn64 | glioblastoma with EGFR | brain | | | pCMV-SPORT6 |
| | | amplification | | | | |
| L3905 | NCI_CGAP_Brn67 | anaplastic | brain | | | pCMV-SPORT6 |
| | | oligodendroglioma | | | | |
| | | with 1p/19q loss | | | | |
| L4497 | NCI_CGAP_Br22 | invasive ductal | breast | | | pCMV-SPORT6 |
| | | carcinoma, 3 | | | | |
| | | pooled samples | | | | |
| L4501 | NCI_CGAP_Sub8 | | | | | pT7T3D-Pac (Pharmacia) |
| | | | | | | with a modified |
| | | | | | | polylinker |
| L4556 | NCI_CGAP_HN13 | squamous cell carcinoma | tongue | | | pCMV-SPORT6 |
| L4669 | NCI_CGAP_Ov41 | serous papillary tumor | ovary | | | pCMV-SPORT6 |
| | | | | | | with a modified |
| | | | | | | polylinker |
| L4747 | NCI_CGAP_Brn41 | oligodendroglioma | brain | | | pT7T3D-Pac (Pharmacia) |
| | | | | | | with a modified |
| | | | | | | polylinker |
| L5565 | NCI_CGAP_Brn66 | glioblastoma with probably | brain | | | pCMV-SPORT6 |
| | | TP53 mutation and witho | | | | |
| L5566 | NCI_CGAP_Brn70 | anaplastic | brain | | | pCMV-SPORT6.ccdb |
| | | oligodendroglioma | | | | |
| L5569 | NCI_CGAP_HN17 | normal epithelium | nasopharynx | | | pAMP10 |
| L5574 | NCI_CGAP_HN19 | normal epithelium | nasopharynx | | | pAMP10 |
| L5575 | NCI_CGAP_Brn65 | glioblastoma without EGFR | brain | | | pCMV-SPORT6 |
| | | amplification | | | | |
| L5622 | NCI_CGAP_Skn3 | | skin | | | pCMV-SPORT6 |
| L5623 | NCI_CGAP_Skn4 | squamous cell carcinoma | skin | | | pCMV-SPORT6 |

Description of Table 5

[0166] Table 5 provides a key to the OMIM reference identification numbers disclosed in Table 1B1, column 9. OMIM reference identification numbers (Column 1) were derived from Online Mendelian Inheritance in Man (Online Mendelian Inheritance in Man, OMIM. McKusick-Nathans Institute for Genetic Medicine, Johns Hopkins University (Baltimore, Md.) and National Center for Biotechnology Information, National Library of Medicine, (Bethesda, Md.) 2000. World Wide Web URL: http://www.ncbi.nlm.nih.gov/omim/). Column 2 provides diseases associated with the cytologic band disclosed in Table 1B.1, column 8, as determined using the Morbid Map database.

TABLE 5

| OMIM Reference | Description |
|---|---|
| 101000 | Meningioma, NF2-related, sporadic Schwannoma, sporadic |
| 101000 | Neurofibromatosis, type 2 |
| 101000 | Neurolemmomatosis |
| 101000 | Malignant mesothelioma, sporadic |
| 102200 | Somatotrophinoma |
| 102772 | [AMP deaminase deficiency, erythrocytic] |
| 103600 | [Dysalbuminemic hyperthyroxinemia] |
| 103600 | [Dysalbuminemic hyperzincemia], 194470 |
| 103600 | Analbuminemia |
| 103850 | Aldolase A deficiency |
| 104150 | [AFP deficiency, congenital] |
| 104150 | [Hereditary persistence of alpha-fetoprotein] |
| 104500 | Amelogenesis imperfecta-2, hypoplastic local type |
| 104770 | Amyloidosis, secondary, susceptibility to |
| 106100 | Angioedema, hereditary |
| 106210 | Peters anomaly |
| 106210 | Cataract, congenital, with late-onset corneal dystrophy |
| 106210 | Foveal hypoplasia, isolated, 136520 |
| 106210 | Aniridia |
| 107271 | CD59 deficiency |
| 107300 | Antithrombin III deficiency |
| 107670 | Apolipoprotein A-II deficiency |
| 107776 | Colton blood group, 110450 |
| 107777 | Diabetes insipidus, nephrogenic, autosomal recessive, 222000 |
| 108725 | Atherosclerosis, susceptibility to |
| 109560 | Leukemia/lymphoma, B-cell, 3 |
| 110700 | Vivax malaria, susceptibility to |
| 112261 | Fibrodysplasia ossificans progressiva |
| 114550 | Hepatocellular carcinoma |
| 114835 | Monocyte carboxyesterase deficiency |
| 115500 | Acatalasemia |
| 116800 | Cataract, Marner type |
| 116806 | Colorectal cancer |
| 116860 | Cavernous angiomatous malformations |
| 118485 | Polycystic ovary syndrome with hyperandrogenemia |
| 120070 | Alport syndrome, autosomal recessive, 203780 |
| 120131 | Alport syndrome, autosomal recessive, 203780 |
| 120131 | Hematuria, familial benign |
| 120140 | Osteoarthrosis, precocious |
| 120140 | SED congenita |
| 120140 | SMED Strudwick type |
| 120140 | Stickler syndrome, type I |
| 120140 | Wagner syndrome, type II |
| 120140 | Achondrogenesis-hypochondrogenesis, type II |
| 120140 | Kniest dysplasia |
| 120220 | Bethlem myopathy, 158810 |
| 120240 | Bethlem myopathy, 158810 |
| 120260 | Epiphyseal dysplasia, multiple, type 2, 600204 |
| 120550 | C1q deficiency, type A |
| 120570 | C1q deficiency, type B |
| 120575 | C1q deficiency, type C |
| 120700 | C3 deficiency |
| 121050 | Contractural arachnodactyly, congenital |
| 121360 | Myeloid leukemia, acute, M4Eo subtype |
| 123000 | Craniometaphyseal dysplasia |
| 123580 | Cataract, congenital, autosomal dominant |
| 123620 | Cataract, cerulean, type 2, 601547 |
| 123940 | White sponge nevus, 193900 |
| 126060 | Anemia, megaloblastic, due to DHFR deficiency |
| 126090 | Hyperphenylalaninemia due to pterin-4a-carbinolamine dehydratase |
| | deficiency, 264070 |
| 126337 | Myxoid liposarcoma |
| 126600 | Doyne honeycomb retinal dystrophy |
| 126600 | Drusen, radial, autosomal dominant |
| 129010 | Neuropathy, congenital hypomyelinating, 1 |
| 129900 | EEC syndrome-1 |
| 130500 | Elliptocytosis-1 |
| 131100 | Multiple endocrine neoplasia I |
| 131100 | Prolactinoma, hyperparathyroidism, carcinoid syndrome |
| 131100 | Carcinoid tumor of lung |
| 131210 | Atherosclerosis, susceptibility to |
| 131400 | Eosinophilia, familial |
| 133171 | [Erythrocytosis, familial], 133100 |
| 133200 | Erythrokeratodermia variabilis |
| 133780 | Vitreoretinopathy, exudative, familial |
| 134570 | Factor XIIIA deficiency |
| 134790 | Hyperferritinemia-cataract syndrome, 600886 |
| 135940 | Ichthyosis vulgaris, 146700 |
| 136132 | [Fish-odor syndrome], 602079 |
| 136435 | Ovarian dysgenesis, hypergonadotropic, with normal karyotype, 233300 |
| 136530 | Male infertility, familial |
| 136836 | Fucosyltransferase-6 deficiency |
| 138030 | [Hyperproglucagonemia] |
| 138040 | Cortisol resistance |
| 138079 | Hyperinsulinism, familial, 602485 |
| 138079 | MODY, type 2, 125851 |
| 138140 | Glucose transport defect, blood-brain barrier |
| 138760 | [Glyoxalase II deficiency] |
| 138981 | Pulmonary alveolar proteinosis, 265120 |
| 139191 | Growth hormone deficient dwarfism |
| 139350 | Epidermolytic hyperkeratosis, 113800 |
| 139350 | Keratoderma, palmoplantar, nonepidermolytic |
| 140100 | [Anhaptoglobinemia] |
| 140100 | [Hypohaptogloginemia] |
| 141750 | Alpha-thalassemia/mental retardation syndrome, type 1 |
| 141800 | Methemoglobinemias, alpha- |
| 141800 | Thalassemias, alpha- |
| 141800 | Erythremias, alpha- |
| 141800 | Heinz body anemias, alpha- |
| 141850 | Thalassemia, alpha- |
| 141850 | Erythrocytosis |
| 141850 | Heinz body anemia |
| 141850 | Hemoglobin H disease |
| 141850 | Hypochromic microcytic anemia |
| 142600 | Hemolytic anemia due to hexokinase deficiency |
| 143200 | Wagner syndrome |
| 143200 | Erosive vitreoretinopathy |
| 143890 | Hypercholesterolemia, familial |
| 145001 | Hyperparathyroidism-jaw tumor syndrome |
| 145981 | Hypocalciuric hypercalcemia, type II |
| 146760 | [IgG receptor I, phagocytic, familial deficiency of] |
| 146790 | Lupus nephritis, susceptibility to |
| 147050 | Atopy |
| 147141 | Leukemia, acute lymphoblastic |
| 147670 | Rabson-Mendenhall syndrome |
| 147670 | Diabetes mellitus, insulin-resistant, with acanthosis nigricans |
| 147670 | Leprechaunism |
| 147781 | Atopy, susceptibility to |
| 148040 | Epidermolysis bullosa simplex, Koebner, Dowling-Meara, and Weber- |
| | Cockayne types, 131900, 131760, 131800 |
| 148041 | Pachyonychia congenita, Jadassohn-Lewandowsky type, 167200 |
| 148043 | Meesmann corneal dystrophy, 122100 |
| 148070 | Liver disease, susceptibility to, from hepatotoxins or viruses |
| 148370 | Keratolytic winter erythema |
| 148900 | Klippel-Feil syndrome with laryngeal malformation |
| 151385 | Leukemia, acute myeloid |
| 151390 | Leukemia, acute T-cell |
| 151410 | Leukemia, chronic myeloid |
| 151440 | Leukemia, T-cell acute lymphoblastoid |
| 151670 | Hepatic lipase deficiency |
| 152445 | Vohwinkel syndrome, 124500 |
| 152445 | Erythrokeratoderma, progressive symmetric, 602036 |
| 152780 | Hypogonadism, hypergonadotropic |
| 152780 | Male pseudohermaphroditism due to defective LH |
| 153455 | Cutis laxa, recessive, type I, 219100 |
| 153700 | Macular dystrophy, vitelliform type |
| 154276 | Malignant hyperthermia susceptibility 3 |
| 154545 | Chronic infections, due to opsonin defect |
| 155555 | [Red hair/fair skin] |
| 155555 | UV-induced skin damage, vulnerability to |
| 156850 | Cataract, congenital, with microphthalmia |
| 159000 | Muscular dystrophy, limb-girdle, type 1A |
| 159001 | Muscular dystrophy, limb-girdle, type 1B |
| 160980 | Carney myxoma-endocrine complex |
| 161015 | Mitochondrial complex I deficiency, 252010 |
| 164009 | Leukemia, acute promyelocytic, NUMA/RARA type |
| 164500 | Spinocerebellar ataxia-7 |
| 164731 | Ovarian carcinoma, 167000 |
| 164920 | Piebaldism |
| 164920 | Mast cell leukemia |
| 164920 | Mastocytosis with associated hematologic disorder |
| 164953 | Liposarcoma |
| 165240 | Pallister-Hall syndrome, 146510 |
| 165240 | Postaxial polydactyly type A1, 174200 |
| 165240 | Greig cephalopolysyndactyly syndrome, 175700 |
| 168461 | Multiple myeloma, 254250 |
| 168461 | Parathyroid adenomatosis 1 |
| 168461 | Centrocytic lymphoma |
| 168468 | Metaphyseal chondrodysplasia, Murk Jansen type, 156400 |
| 170650 | Periodontitis, juvenile |
| 171860 | Hemolytic anemia due to phosphofructokinase deficiency |
| 172400 | Hemolytic anemia due to glucosephosphate isomerase deficiency |
| 172400 | Hydrops fetalis, one form |
| 172471 | Glycogenosis, hepatic, autosomal |
| 173610 | Platelet alpha/delta storage pool deficiency |
| 174000 | Medullary cystic kidney disease, AD |
| 174810 | Osteolysis, familial expansile |
| 176640 | Creutzfeldt-Jakob disease, 123400 |
| 176640 | Gerstmann-Straussler disease, 137440 |
| 176640 | Insomnia, fatal familial |
| 176880 | Protein S deficiency |
| 178300 | Ptosis, hereditary congenital, 1 |
| 178640 | Pulmonary alveolar proteinosis, congenital, 265120 |
| 179095 | Male infertility |
| 179615 | Reticulosis, familial histiocytic, 267700 |
| 179615 | Severe combined immunodeficiency, B cell-negative, 601457 |
| 179616 | Severe combined immunodeficiency, B cell-negative, 601457 |
| 179755 | Renal cell carcinoma, papillary, 1 |
| 180104 | Retinitis pigmentosa-9 |
| 180105 | Retinitis pigmentosa-10 |
| 180200 | Osteosarcoma, 259500 |
| 180200 | Pinealoma with bilateral retinoblastoma |
| 180200 | Retinoblastoma |
| 180200 | Bladder cancer, 109800 |
| 180385 | Leukemia, acute T-cell |
| 180721 | Retinitis pigmentosa, digenic |
| 180840 | Susceptibility to IDDM |
| 180901 | Malignant hyperthermia susceptibility 1, 145600 |
| 180901 | Central core disease, 117000 |
| 181405 | Scapuloperoneal spinal muscular atrophy, New England type |
| 181460 | Schistosoma mansoni, susceptibility/resistance to |
| 181510 | Schizophrenia |
| 182280 | Small-cell cancer of lung |
| 182381 | Renal glucosuria, 253100 |
| 182860 | Pyropoikilocytosis |
| 182860 | Spherocytosis, recessive |
| 182860 | Elliptocytosis-2 |
| 186580 | Arthrocutaneouveal granulomatosis |
| 188070 | Bleeding disorder due to defective thromboxane A2 receptor |
| 188826 | Sorsby fundus dystrophy, 136900 |
| 189800 | Preeclampsia/eclampsia |
| 190685 | Down syndrome |
| 191092 | Tuberous sclerosis-2 |
| 191181 | Cervical carcinoma |
| 191315 | Insensitivity to pain, congenital, with anhidrosis, 256800 |
| 192090 | Ovarian carcinoma |
| 192090 | Breast cancer, lobular |
| 192090 | Endometrial carcinoma |
| 192090 | Gastric cancer, familial, 137215 |
| 192974 | Neonatal alloimmune thrombocytopenia |
| 192974 | Glycoprotein Ia deficiency |
| 193235 | Vitreoretinopathy, neovascular inflammatory |
| 193300 | Renal cell carcinoma |
| 193300 | von Hippel-Lindau syndrome |
| 194070 | Wilms tumor, type 1 |
| 194070 | Denys-Drash syndrome |
| 194070 | Frasier syndrome, 136680 |
| 203740 | Alpha-ketoglutarate dehydrogenase deficiency |
| 205900 | Anemia, Diamond-Blackfan |
| 208400 | Aspartylglucosaminuria |
| 209901 | Bardet-Biedl syndrome 1 |
| 212138 | Carnitine-acylcarnitine translocase deficiency |
| 216550 | Cohen syndrome |
| 216900 | Achromatopsia |
| 217800 | Macular corneal dystrophy |
| 218030 | Apparent mineralocorticoid excess, hypertension due to |
| 219800 | Cystinosis, nephropathic |
| 221770 | Polycystic lipomembranous osteodysplasia with sclerosing |
| | leukencephalopathy |
| 222745 | DECR deficiency |
| 222800 | Hemolytic anemia due to bisphosphoglycerate mutase deficiency |
| 222900 | Sucrose intolerance |
| 227646 | Fanconi anemia, type D |
| 227650 | Fanconi anemia, type A |
| 230800 | Gaucher disease |
| 230800 | Gaucher disease with cardiovascular calcification |
| 231550 | Achalasia-addisonianism-alacrimia syndrome |
| 231670 | Glutaricaciduria, type I |
| 231675 | Glutaricaciduria, type IIC |
| 231680 | Glutaricaciduria, type IIA |
| 232500 | Glycogen storage disease IV |
| 232600 | McArdle disease |
| 233700 | Chronic granulomatous disease due to deficiency of NCF-1 |
| 236100 | Holoprosencephaly-1 |
| 236200 | Homocystinuria, B6-responsive and nonresponsive types |
| 236700 | McKusick-Kaufman syndrome |
| 240300 | Autoimmune polyglandular disease, type I |
| 245349 | Lacticacidemia due to PDX1 deficiency |
| 245900 | Norum disease |
| 245900 | Fish-eye disease |
| 248600 | Maple syrup urine disease, type Ia |
| 249100 | Familial Mediterranean fever |
| 250850 | Hypermethioninemia, persistent, autosomal dominant, due to methionine |
| | adenosyltransferase I/III deficiency |
| 253000 | Mucopolysaccharidosis IVA |
| 253200 | Maroteaux-Lamy syndrome, several forms |
| 259700 | Osteopetrosis, recessive |
| 259770 | Osteoporosis-pseudoglioma syndrome |
| 259900 | Hyperoxaluria, primary, type 1 |
| 261670 | Myopathy due to phosphoglycerate mutase deficiency |
| 266200 | Anemia, hemolytic, due to PK deficiency |
| 266600 | Inflammatory bowel disease-1 |
| 267750 | Knobloch syndrome |
| 268800 | Sandhoff disease, infantile, juvenile, and adult forms |
| 268800 | Spinal muscular atrophy, HEXB-related |
| 272800 | Tay-Sachs disease |
| 272800 | [Hex A pseudodeficiency] |
| 272800 | GM2-gangliosidosis, juvenile, adult |
| 274180 | Thromboxane synthase deficiency |
| 276600 | Tyrosinemia, type II |
| 276700 | Tyrosinemia, type I |
| 300011 | Menkes disease, 309400 |
| 300011 | Occipital horn syndrome, 304150 |
| 300011 | Cutis laxa, neonatal |
| 300046 | Mental retardation, X-linked 23, nonspecific |
| 300047 | Mental retardation, X-linked 20 |
| 300067 | Subcortical laminar heterotopia, X-linked dominant |
| 300067 | Lissencephaly, X-linked |
| 300071 | Night blindness, congenital stationary, type 2 |
| 300075 | Coffin-Lowry syndrome, 303600 |
| 300077 | Mental retardation, X-linked 29 |
| 300110 | Night blindness, congenital stationary, X-linked incomplete, 300071 |
| 300121 | Subcortical laminal heteropia, X-linked, 300067 |
| 300121 | Lissencephaly, X-linked, 300067 |
| 300127 | Mental retardation, X-linked, 60 |
| 300600 | Ocular albinism, Forsius-Eriksson type |
| 301000 | Thrombocytopenia, X-linked, 313900 |
| 301000 | Wiskott-Aldrich syndrome |
| 301200 | Amelogenesis imperfecta |
| 301201 | Amelogenesis imperfecta-3, hypoplastic type |
| 301830 | Arthrogryposis, X-linked (spinal muscular atrophy, infantile, X-linked) |
| 301835 | Arts syndrome |
| 302350 | Nance-Horan syndrome |
| 302801 | Charcot-Marie-Tooth neuropathy, X-linked-2, recessive |
| 305435 | Heterocellular hereditary persistence of fetal hemoglobin, Swiss type |
| 305450 | FG syndrome |
| 306000 | Glycogenosis, X-linked hepatic, type I |
| 306000 | Glycogenosis, X-linked hepatic, type II |
| 307800 | Hypophosphatemia, hereditary |
| 308800 | Keratosis follicularis spinulosa decalvans |
| 309470 | Mental retardation, X-linked, syndromic-3, with spastic diplegia |
| 309500 | Renpenning syndrome-1 |
| 309510 | Mental retardation, X-linked, syndromic-1, with dystonic movements, ataxia, |
| | and seizures |
| 309605 | Mental retardation, X-linked, syndromic-4, with congenital contractures and |
| | low fingertip arches |
| 309610 | Mental retardation, X-linked, syndromic-2, with dysmorphism and cerebral |
| | atrophy |
| 309850 | Brunner syndrome |
| 311050 | Optic atrophy, X-linked |
| 311200 | Oral-facial-digital syndrome 1 |
| 311850 | Phosphoribosyl pyrophosphate synthetase-related gout |
| 312040 | N syndrome, 310465 |
| 312060 | Properdin deficiency, X-linked |
| 312170 | Pyruvate dehydrogenase deficiency |
| 312700 | Retinoschisis |
| 313400 | Spondyloepiphyseal dysplasia tarda |
| 313700 | Perineal hypospadias |
| 313700 | Prostate cancer |
| 313700 | Spinal and bulbar muscular atrophy of Kennedy, 313200 |
| 313700 | Breast cancer, male, with Reifenstein syndrome |
| 313700 | Androgen insensitivity, several forms |
| 314580 | Wieacker-Wolff syndrome |
| 600040 | Colorectal cancer |
| 600045 | Xeroderma pigmentosum, group E, subtype 2 |
| 600065 | Leukocyte adhesion deficiency, 116920 |
| 600079 | Colon cancer |
| 600140 | Rubenstein-Taybi syndrome, 180849 |
| 600151 | Bardet-Biedl syndrome 3 |
| 600163 | Long QT syndrome-3 |
| 600194 | Ichthyosis bullosa of Siemens, 146800 |
| 600223 | Spinocerebellar ataxia-4 |
| 600231 | Palmoplantar keratoderma, Bothnia type |
| 600234 | HMG-CoA synthease-2 deficiency |
| 600273 | Polycystic kidney disease, infantile severe, with tuberous sclerosis |
| 600276 | Cerebral arteriopathy with subcortical infarcts and leukoencephalopathy, |
| | 125310 |
| 600319 | Diabetes mellitus, insulin-dependent, 4 |
| 600354 | Spinal muscular atrophy-1, 253300 |
| 600354 | Spinal muscular atrophy-2, 253550 |
| 600354 | Spinal muscular atrophy-3, 253400 |
| 600374 | Bardet-Biedl syndrome 4 |
| 600528 | CPT deficiency, hepatic, type I, 255120 |
| 600536 | Myopathy, congenital |
| 600631 | Enuresis, nocturnal, 1 |
| 600652 | Deafness, autosomal dominant 4 |
| 600678 | Cancer susceptibility |
| 600757 | Orofacial cleft-3 |
| 600760 | Pseudohypoaldosteronism, type I, 264350 |
| 600760 | Liddle syndrome, 177200 |
| 600761 | Pseudohypoaldosteronism, type I, 264350 |
| 600761 | Liddle syndrome, 177200 |
| 600795 | Dementia, familial, nonspecific |
| 600807 | Bronchial asthma |
| 600808 | Enuresis, nocturnal, 2 |
| 600850 | Schizophrenia disorder-4 |
| 600882 | Charcot-Marie-Tooth neuropathy-2B |
| 600887 | Endometrial carcinoma |
| 600897 | Cataract, zonular pulverulent-1, 116200 |
| 600900 | Muscular dystrophy, limb-girdle, type 2E |
| 600918 | Cystinuria, type III |
| 600956 | Persistent Mullerian duct syndrome, type II, 261550 |
| 600957 | Persistent Mullerian duct syndrome, type I, 261550 |
| 600975 | Glaucoma 3, primary infantile, B |
| 601072 | Deafness, autosomal recessive 8 |
| 601090 | Iridogoniodysgenesis, 601631 |
| 601105 | Pycnodysostosis, 265800 |
| 601145 | Epilepsy, progressive myoclonic 1, 254800 |
| 601238 | Cerebellar ataxia, Cayman type |
| 601284 | Hereditary hemorrhagic telangiectasia-2, 600376 |
| 601313 | Polycystic kidney disease, adult type I, 173900 |
| 601362 | DiGeorge syndrome/velocardiofacial syndrome complex-2 |
| 601386 | Deafness, autosomal recessive 12 |
| 601412 | Deafness, autosomal dominant 7 |
| 601472 | Charcot-Marie-Tooth neuropathy-2D |
| 601493 | Cardiomyopathy, dilated 1C |
| 601567 | Combined factor V and VIII deficiency, 227300 |
| 601596 | Charcot-Marie-Tooth neuropathy, demyelinating |
| 601649 | Blepharophimosis, epicanthus inversus, and ptosis, type 2 |
| 601650 | Paraganglioma, familial nonchromaffin, 2 |
| 601652 | Glaucoma 1A, primary open angle, juvenile-onset, 137750 |
| 601669 | Hirschsprung disease, one form |
| 601692 | Reis-Bucklers corneal dystrophy |
| 601692 | Corneal dystrophy, Avellino type |
| 601692 | Corneal dystrophy, Groenouw type I, 121900 |
| 601692 | Corneal dystrophy, lattice type I, 122200 |
| 601769 | Osteoporosis, involutional |
| 601769 | Rickets, vitamin D-resistant, 277440 |
| 601780 | Ceroid-lipofuscinosis, neuronal-6, variant late infantile |
| 601785 | Carbohydrate-deficient glycoprotein syndrome, type I, 212065 |
| 601843 | Hypothyroidism, congenital, 274400 |
| 601846 | Muscular dystrophy with rimmed vacuoles |
| 601863 | Bare lymphocyte syndrome, complementation group C |
| 601884 | [High bone mass] |
| 601920 | Alagille syndrome, 118450 |
| 601928 | Monilethrix, 158000 |
| 602028 | Multiple myeloma |
| 602078 | Fibrosis of extraocular muscles, congenital, 2 |
| 602080 | Paget disease of bone-2 |
| 602089 | Hemangioma, capillary, hereditary |
| 602092 | Deafness, autosomal recessive 18 |
| 602094 | Lipodystrophy, familial partial |
| 602116 | Glioma |
| 602121 | Deafness, autosomal dominant nonsyndromic sensorineural, 1, 124900 |
| 602136 | Refsum disease, infantile, 266510 |
| 602136 | Zellweger syndrome-1, 214100 |
| 602136 | Adrenoleukodystrophy, neonatal, 202370 |
| 602153 | Monilethrix, 158000 |
| 602216 | Peutz-Jeghers syndrome, 175200 |
| 602447 | Coronary artery disease, susceptibility to |
| 602460 | Deafness, autosomal dominant 15, 602459 |
| 602477 | Febrile convulsions, familial, 2 |
| 602491 | Hyperlipidemia, familial combined, 1 |
| 602568 | Homocystinuria-megaloblastic anemia, cbl E type, 236270 |
| 602716 | Nephrosis-1, congenital, Finnish type, 256300 |
| 602783 | Spastic paraplegia-7 |

[0167] Mature Polypeptides

[0168] The present invention also encompasses mature forms of a polypeptide having the amino acid sequence of SEQ ID NO:Y and/or the amino acid sequence encoded by the cDNA in a deposited clone. Polynucleotides encoding the mature forms (such as, for example, the polynucleotide sequence in SEQ ID NO:X and/or the polynucleotide sequence contained in the cDNA of a deposited clone) are also encompassed by the invention. Moreover, fragments or variants of these polypeptides (such as, fragments as described herein, polypeptides at least 80%, 85%, 90%, 95%, 96%, 97%, 98%, 99%, or 100% identical to these polypeptides, or polypeptides encoded by a polynucleotide that hybridizes under stringent conditions to the complementary strand of the polynucleotide encoding these polypeptides) are also encompassed by the invention. In preferred embodiments, these fragments or variants retain one or more functional acitivities of the full-length or mature form of the polypeptide (e.g., biological activity (such as, for example, activity useful in detecting, preventing, diagnosing, prognosticating, treating, and/or ameliorating diabetes mellitus), antigenicity (ability to bind, or compete with a polypeptide of the invention for binding, to an anti-polypeptide of the invention antibody), immunogenicity (ability to generate antibody which binds to a specific polypeptide of the invention), ability to form multimers with polypeptides of the invention, and ability to bind to a receptor or ligand for a polypeptide of the invention). Antibodies that bind the polypeptides of the invention, and polynucleotides encoding these peptides are also encompassed by the invention.

[0169] According to the signal hypothesis, proteins secreted by mammalian cells have a signal or secretary leader sequence which is cleaved from the mature protein once export of the growing protein chain across the rough endoplasmic reticulum has been initiated. Most mammalian cells and even insect cells cleave secreted proteins with the same specificity. However, in some cases, cleavage of a secreted protein is not entirely uniform, which results in two or more mature species of the protein. Further, it has long been known that cleavage specificity of a secreted protein is ultimately determined by the primary structure of the complete protein, that is, it is inherent in the amino acid sequence of the polypeptide.

[0170] Methods for predicting whether a protein has a signal sequence, as well as the cleavage point for that sequence, are available. For instance, the method of McGeoch, Virus Res. 3:271-286 (1985), uses the information from a short N-terminal charged region and a subsequent uncharged region of the complete (uncleaved) protein. The method of von Heinje, Nucleic Acids Res. 14:4683-4690 (1986) uses the information from the residues surrounding the cleavage site, typically residues −13 to +2, where +1 indicates the amino terminus of the secreted protein. The accuracy of predicting the cleavage points of known mammalian secretory proteins for each of these methods is in the range of 75-80%. (von Heinje, supra.) However, the two methods do not always produce the same predicted cleavage point(s) for a given protein.

[0171] In the present case, the deduced amino acid sequence of the secreted polypeptide was analyzed by a computer program called SignalP (Henrik Nielsen et al., Protein Engineering 10: 1-6 (1997)), which predicts the cellular location of a protein based on the amino acid sequence. As part of this computational prediction of localization, the methods of McGeoch and von Heinje are incorporated. The analysis of the amino acid sequences of the secreted proteins described herein by this program provided the results shown in Table 1A.

[0172] In specific embodiments, polypeptides of the invention comprise, or alternatively consist of, the predicted mature form of the polypeptide as delineated in columns 14 and 15 of Table 1A. Moreover, fragments or variants of these polypeptides (such as, fragments as described herein, polypeptides at least 80%, 85%, 90%, 95%, 96%, 97%, 98%, 99%, or 100% identical to these polypeptides, or polypeptides encoded by a polynucleotide that hybridizes under stringent conditions to the complementary strand of the polynucleotide encoding these polypeptides) are also encompassed by the invention. In preferred embodiments, these fragments or variants retain one or more functional acitivities of the full-length or mature form of the polypeptide (e.g., biological activity (such as, for example, activity useful in detecting, preventing, diagnosing, prognosticating, treating, and/or ameliorating diabetes mellitus), antigenicity (ability to bind, or compete with a polypeptide of the invention for binding, to an anti-polypeptide of the invention antibody), immunogenicity (ability to generate antibody which binds to a specific polypeptide of the invention), ability to form multimers with polypeptides of the invention, and ability to bind to a receptor or ligand for a polypeptide of the invention). Antibodies that bind the polypeptides of the invention, and polynucleotides encoding these polypeptides are also encompassed by the invention.

[0173] Polynucleotides encoding proteins comprising, or consisting of, the predicted mature form of polypeptides of the invention (e.g., polynucleotides having the sequence of SEQ ID NO: X (Table 1A, column 4), the sequence delineated in columns 7 and 8 of Table 1A, and a sequence encoding the mature polypeptide delineated in columns 14 and 15 of Table 1A (e.g., the sequence of SEQ ID NO:X encoding the mature polypeptide delineated in columns 14 and 15 of Table 1)) are also encompassed by the invention, as are fragments or variants of these polynucleotides (such as, fragments as described herein, polynucleotides at least 80%, 85%, 90%, 95%, 96%, 97%, 98%, 99%, or 100% identical to these polyncueotides, and nucleic acids which hybridizes under stringent conditions to the complementary strand of the polynucleotide).

[0174] As one of ordinary skill would appreciate, however, cleavage sites sometimes vary from organism to organism and cannot be predicted with absolute certainty. Accordingly, the present invention provides secreted polypeptides having a sequence shown in SEQ ID NO:Y which have an N-terminus beginning within 15 residues of the predicted cleavage point (i.e., having 1, 2, 3, 4, 5, 6, 7, 8, 9, 10, 11, 12, 13, 14, or 15 more or less contiguous residues of SEQ ID NO:Y at the N-terminus when compared to the predicted mature form of the polypeptide (e.g., the mature polypeptide delineated in columns 14 and 15 of Table 1). Similarly, it is also recognized that in some cases, cleavage of the signal sequence from a secreted protein is not entirely uniform, resulting in more than one secreted species. These polypeptides, and the polynucleotides encoding such polypeptides, are contemplated by the present invention.

[0175] Moreover, the signal sequence identified by the above analysis may not necessarily predict the naturally occurring signal sequence. For example, the naturally occurring signal sequence may be further upstream from the predicted signal sequence. However, it is likely that the predicted signal sequence will be capable of directing the secreted protein to the ER. Nonetheless, the present invention provides the mature protein produced by expression of the polynucleotide sequence of SEQ ID NO:X and/or the polynucleotide sequence contained in the cDNA of a deposited clone, in a mammalian cell (e.g., COS cells, as desribed below). These polypeptides, and the polynucleotides encoding such polypeptides, are contemplated by the present invention.

[0176] Polynucleotide and Polypeptide Variants

[0177] The present invention is also directed to variants of the polynucleotide sequence disclosed in SEQ ID NO:X or the complementary strand thereto, nucleotide sequences encoding the polypeptide of SEQ ID NO:Y, the nucleotide sequence of SEQ ID NO:X that encodes the polypeptide sequence as defined in columns 13 and 14 of Table 1A, nucleotide sequences encoding the polypeptide sequence as defined in columns 13 and 14 of Table 1A, the nucleotide sequence of SEQ ID NO:X encoding the polypeptide sequence as defined in Table 1B, nucleotide sequences encoding the polypeptide as defined in Table 1B, the nucleotide sequence as defined in columns 8 and 9 of Table 2, nucleotide sequences encoding the polypeptide encoded by the nucleotide sequence as defined in columns 8 and 9 of Table 2, the nucleotide sequence as defined in column 6 of Table 1C, nucleotide sequences encoding the polypeptide encoded by the nucleotide sequence as defined in column 6 of Table 1C, the cDNA sequence contained in ATCC Deposit No:Z, nucleotide sequences encoding the polypeptide encoded by the cDNA sequence contained in ATCC Deposit No:Z, and/or nucleotide sequences encoding a mature (secreted) polypeptide encoded by the cDNA sequence contained in ATCC Deposit No:Z.

[0178] The present invention also encompasses variants of the polypeptide sequence disclosed in SEQ ID NO:Y, the polypeptide as defined in columns 13 and 14 of Table 1A, the polypeptide sequence as defined in Table 1B, a polypeptide sequence encoded by the polynucleotide sequence in SEQ ID NO:X, a polypeptide sequence encoded by the nucleotide sequence as defined in columns 8 and 9 of Table 2, a polypeptide sequence encoded by the nucleotide sequence as defined in column 6 of Table 1C, a polypeptide sequence encoded by the complement of the polynucleotide sequence in SEQ ID NO:X, the polypeptide sequence encoded by the cDNA sequence contained in ATCC Deposit No:Z and/or a mature (secreted) polypeptide encoded by the cDNA sequence contained in ATCC Deposit No:Z.

[0179] “Variant” refers to a polynucleotide or polypeptide differing from the polynucleotide or polypeptide of the present invention, but retaining essential properties thereof. Generally, variants are overall closely similar, and, in many regions, identical to the polynucleotide or polypeptide of the present invention.

[0180] Thus, one aspect of the invention provides an isolated nucleic acid molecule comprising, or alternatively consisting of, a polynucleotide having a nucleotide sequence selected from the group consisting of: (a) a nucleotide sequence described in SEQ ID NO:X or contained in the cDNA sequence of ATCC Deposit No:Z; (b) a nucleotide sequence in SEQ ID NO:X or the cDNA in ATCC Deposit No:Z which encodes the complete amino acid sequence of SEQ ID NO:Y or the complete amino acid sequence encoded by the cDNA in ATCC Deposit No:Z; (c) a nucleotide sequence in SEQ ID NO:X or the cDNA in ATCC Deposit No:Z which encodes a mature polypeptide (i.e., a secreted polypeptide (e.g., as delineated in columns 14 and 15 of Table 1A)); (d) a nucleotide sequence in SEQ ID NO:X or the cDNA sequence of ATCC Deposit No:Z, which encodes a biologically active fragment of a polypeptide; (e) a nucleotide sequence in SEQ ID NO:X or the cDNA sequence of ATCC Deposit No:Z, which encodes an antigenic fragment of a polypeptide; (f) a nucleotide sequence encoding a polypeptide comprising the complete amino acid sequence of SEQ ID NO:Y or the complete amino acid sequence encoded by the cDNA in ATCC Deposit No:Z; (g) a nucleotide sequence encoding a mature polypeptide of the amino acid sequence of SEQ ID NO:Y (i.e., a secreted polypeptide (e.g., as delineated in columns 14 and 15 of Table 1A)) or a mature polypeptide of the amino acid sequence encoded by the cDNA in ATCC Deposit No:Z; (h) a nucleotide sequence encoding a biologically active fragment of a polypeptide having the complete amino acid sequence of SEQ ID NO:Y or the complete amino acid sequence encoded by the cDNA in ATCC Deposit No:Z; (i) a nucleotide sequence encoding an antigenic fragment of a polypeptide having the complete amino acid sequence of SEQ ID NO:Y or the complete amino acid sequence encoded by the cDNA in ATCC Deposit No:Z; and (j) a nucleotide sequence complementary to any of the nucleotide sequences in (a), (b), (c), (d), (e), (f), (g), (h), or (i) above.

[0181] The present invention is also directed to nucleic acid molecules which comprise, or alternatively consist of, a nucleotide sequence which is at least 80%, 85%, 90%, 95%, 96%, 97%, 98%, 99% or 100%, identical to, for example, any of the nucleotide sequences in (a), (b), (c), (d), (e), (f), (g), (h), (i), or (j) above, the nucleotide coding sequence in SEQ ID NO:X or the complementary strand thereto, the nucleotide coding sequence of the cDNA contained in ATCC Deposit No:Z or the complementary strand thereto, a nucleotide sequence encoding the polypeptide of SEQ ID NO:Y, a nucleotide sequence encoding a polypeptide sequence encoded by the nucleotide sequence in SEQ ID NO:X, a polypeptide sequence encoded by the complement of the polynucleotide sequence in SEQ ID NO:X, a nucleotide sequence encoding the polypeptide encoded by the cDNA contained in ATCC Deposit No:Z, the nucleotide coding sequence in SEQ ID NO:X as defined in columns 8 and 9 of Table 2 or the complementary strand thereto, a nucleotide sequence encoding the polypeptide encoded by the nucleotide sequence in SEQ ID NO:X as defined in columns 8 and 9 of Table 2 or the complementary strand thereto, the nucleotide coding sequence in SEQ ID NO:B as defined in column 6 of Table 1C or the complementary strand thereto, a nucleotide sequence encoding the polypeptide encoded by the nucleotide sequence in SEQ ID NO:B as defined in column 6 of Table 1C or the complementary strand thereto, the nucleotide sequence in SEQ ID NO:X encoding the polypeptide sequence as defined in Table 1B or the complementary strand thereto, nucleotide sequences encoding the polypeptide as defined in Table 1B or the complementary strand thereto, and/or polynucleotide fragments of any of these nucleic acid molecules (e.g., those fragments described herein). Polynucleotides which hybridize to the complement of these nucleic acid molecules under stringent hybridization conditions or alternatively, under lower stringency conditions, are also encompassed by the invention, as are polypeptides encoded by these polynucleotides and nucleic acids.

[0182] In a preferred embodiment, the invention encompasses nucleic acid molecules which comprise, or alternatively, consist of a polynucleotide which hybridizes under stringent hybridization conditions, or alternatively, under lower stringency conditions, to a polynucleotide in (a), (b), (c), (d), (e), (f), (g), (h), or (i), above, as are polypeptides encoded by these polynucleotides. In another preferred embodiment, polynucleotides which hybridize to the complement of these nucleic acid molecules under stringent hybridization conditions, or alternatively, under lower stringency conditions, are also encompassed by the invention, as are polypeptides encoded by these polynucleotides.

[0183] In another embodiment, the invention provides a purified protein comprising, or alternatively consisting of, a polypeptide having an amino acid sequence selected from the group consisting of: (a) the complete amino acid sequence of SEQ ID NO:Y or the complete amino acid sequence encoded by the cDNA in ATCC Deposit No:Z; (b) the amino acid sequence of a mature (secreted) form of a polypeptide having the amino acid sequence of SEQ ID NO:Y (e.g., as delineated in columns 14 and 15 of Table 1A) or a mature form of the amino acid sequence encoded by the cDNA in ATCC Deposit No:Z mature; (c) the amino acid sequence of a biologically active fragment of a polypeptide having the complete amino acid sequence of SEQ ID NO:Y or the complete amino acid sequence encoded by the cDNA in ATCC Deposit No:Z; and (d) the amino acid sequence of an antigenic fragment of a polypeptide having the complete amino acid sequence of SEQ ID NO:Y or the complete amino acid sequence encoded by the cDNA in ATCC Deposit No:Z.

[0184] The present invention is also directed to proteins which comprise, or alternatively consist of, an amino acid sequence which is at least 80%, 85%, 90%, 95%, 96%, 97%, 98%, 99% or 100%, identical to, for example, any of the amino acid sequences in (a), (b), (c), or (d), above, the amino acid sequence shown in SEQ ID NO:Y, the amino acid sequence encoded by the cDNA contained in ATCC Deposit No:Z, the amino acid sequence of the polypeptide encoded by the nucleotide sequence in SEQ ID NO:X as defined in columns 8 and 9 of Table 2, the amino acid sequence of the polypeptide encoded by the nucleotide sequence in SEQ ID NO:B as defined in column 6 of Table 1C, the amino acid sequence as defined in Table 1B, an amino acid sequence encoded by the nucleotide sequence in SEQ ID NO:X, and an amino acid sequence encoded by the complement of the polynucleotide sequence in SEQ ID NO:X. Fragments of these polypeptides are also provided (e.g., those fragments described herein). Further proteins encoded by polynucleotides which hybridize to the complement of the nucleic acid molecules encoding these amino acid sequences under stringent hybridization conditions or alternatively, under lower stringency conditions, are also encompassed by the invention, as are the polynucleotides encoding these proteins.

[0185] By a nucleic acid having a nucleotide sequence at least, for example, 95% “identical” to a reference nucleotide sequence of the present invention, it is intended that the nucleotide sequence of the nucleic acid is identical to the reference sequence except that the nucleotide sequence may include up to five point mutations per each 100 nucleotides of the reference nucleotide sequence encoding the polypeptide. In other words, to obtain a nucleic acid having a nucleotide sequence at least 95% identical to a reference nucleotide sequence, up to 5% of the nucleotides in the reference sequence may be deleted or substituted with another nucleotide, or a number of nucleotides up to 5% of the total nucleotides in the reference sequence may be inserted into the reference sequence. The query sequence may be an entire sequence referred to in Table 1B or 2 as the ORF (open reading frame), or any fragment specified as described herein.

[0186] As a practical matter, whether any particular nucleic acid molecule or polypeptide is at least 80%, 85%, 90%, 95%, 96%, 97%, 98% or 99% identical to a nucleotide sequence of the present invention can be determined conventionally using known computer programs. A preferred method for determining the best overall match between a query sequence (a sequence of the present invention) and a subject sequence, also referred to as a global sequence alignment, can be determined using the FASTDB computer program based on the algorithm of Brutlag et al. (Comp. App. Biosci. 6:237-245 (1990)). In a sequence alignment the query and subject sequences are both DNA sequences. An RNA sequence can be compared by converting U's to T's. The result of said global sequence alignment is expressed as percent identity. Preferred parameters used in a FASTDB alignment of DNA sequences to calculate percent identity are: Matrix=Unitary, k-tuple=4, Mismatch Penalty=1, Joining Penalty=30, Randomization Group Length=0, Cutoff Score=1, Gap Penalty=5, Gap Size Penalty 0.05, Window Size=500 or the length of the subject nucleotide sequence, whichever is shorter.

[0187] If the subject sequence is shorter than the query sequence because of 5′ or 3′ deletions, not because of internal deletions, a manual correction must be made to the results. This is because the FASTDB program does not account for 5′ and 3′ truncations of the subject sequence when calculating percent identity. For subject sequences truncated at the 5′ or 3′ ends, relative to the query sequence, the percent identity is corrected by calculating the number of bases of the query sequence that are 5′ and 3′ of the subject sequence, which are not matched/aligned, as a percent of the total bases of the query sequence. Whether a nucleotide is matched/aligned is determined by results of the FASTDB sequence alignment. This percentage is then subtracted from the percent identity, calculated by the above FASTDB program using the specified parameters, to arrive at a final percent identity score. This corrected score is what is used for the purposes of the present invention. Only bases outside the 5′ and 3′ bases of the subject sequence, as displayed by the FASTDB alignment, which are not matched/aligned with the query sequence, are calculated for the purposes of manually adjusting the percent identity score.

[0188] For example, a 90 base subject sequence is aligned to a 100 base query sequence to determine percent identity. The deletions occur at the 5′ end of the subject sequence and therefore, the FASTDB alignment does not show a matched/alignment of the first 10 bases at 5′ end. The 10 unpaired bases represent 10% of the sequence (number of bases at the 5′ and 3′ ends not matched/total number of bases in the query sequence) so 10% is subtracted from the percent identity score calculated by the FASTDB program. If the remaining 90 bases were perfectly matched the final percent identity would be 90%. In another example, a 90 base subject sequence is compared with a 100 base query sequence. This time the deletions are internal deletions so that there are no bases on the 5′ or 3′ of the subject sequence which are not matched/aligned with the query. In this case the percent identity calculated by FASTDB is not manually corrected. Once again, only bases 5′ and 3′ of the subject sequence which are not matched/aligned with the query sequence are manually corrected for. No other manual corrections are to be made for the purposes of the present invention.

[0189] By a polypeptide having an amino acid sequence at least, for example, 95% “identical” to a query amino acid sequence of the present invention, it is intended that the amino acid sequence of the subject polypeptide is identical to the query sequence except that the subject polypeptide sequence may include up to five amino acid alterations per each 100 amino acids of the query amino acid sequence. In other words, to obtain a polypeptide having an amino acid sequence at least 95% identical to a query amino acid sequence, up to 5% of the amino acid residues in the subject sequence may be inserted, deleted, (indels) or substituted with another amino acid. These alterations of the reference sequence may occur at the amino or carboxy terminal positions of the reference amino acid sequence or anywhere between those terminal positions, interspersed either individually among residues in the reference sequence or in one or more contiguous groups within the reference sequence.

[0190] As a practical matter, whether any particular polypeptide is at least 80%, 85%, 90%, 95%, 96%, 97%, 98% or 99% identical to, for instance, the amino acid sequence of a polypeptide referred to in Table 1A (e.g., the amino acid sequence delineated in columns 14 and 15) or a fragment thereof, Table 1B.1 (e.g., the amino acid sequence identified in column 6) or a fragment thereof, Table 2 (e.g., the amino acid sequence of the polypeptide encoded by the polynucleotide sequence defined in columns 8 and 9 of Table 2) or a fragment thereof, the amino acid sequence of the polypeptide encoded by the polynucleotide sequence in SEQ ID NO:B as defined in column 6 of Table 1C or a fragment thereof, the amino acid sequence of the polypeptide encoded by the nucleotide sequence in SEQ ID NO:X or a fragment thereof, or the amino acid sequence of the polypeptide encoded by cDNA contained in ATCC Deposit No:Z, or a fragment thereof, the amino acid sequence of a mature (secreted) polypeptide encoded by cDNA contained in ATCC Deposit No:Z, or a fragment thereof, can be determined conventionally using known computer programs. A preferred method for determining the best overall match between a query sequence (a sequence of the present invention) and a subject sequence, also referred to as a global sequence alignment, can be determined using the FASTDB computer program based on the algorithm of Brutlag et al. (Comp. App. Biosci. 6:237-245 (1990)). In a sequence alignment the query and subject sequences are either both nucleotide sequences or both amino acid sequences. The result of said global sequence alignment is expressed as percent identity. Preferred parameters used in a FASTDB amino acid alignment are: Matrix=PAM 0, k-tuple=2, Mismatch Penalty=1, Joining Penalty=20, Randomization Group Length=0, Cutoff Score=1, Window Size=sequence length, Gap Penalty=5, Gap Size Penalty=0.05, Window Size=500 or the length of the subject amino acid sequence, whichever is shorter.

[0191] If the subject sequence is shorter than the query sequence due to N- or C-terminal deletions, not because of internal deletions, a manual correction must be made to the results. This is because the FASTDB program does not account for N- and C-terminal truncations of the subject sequence when calculating global percent identity. For subject sequences truncated at the N- and C-termini, relative to the query sequence, the percent identity is corrected by calculating the number of residues of the query sequence that are N- and C-terminal of the subject sequence, which are not matched/aligned with a corresponding subject residue, as a percent of the total bases of the query sequence. Whether a residue is matched/aligned is determined by results of the FASTDB sequence alignment. This percentage is then subtracted from the percent identity, calculated by the above FASTDB program using the specified parameters, to arrive at a final percent identity score. This final percent identity score is what is used for the purposes of the present invention. Only residues to the N- and C-termini of the subject sequence, which are not matched/aligned with the query sequence, are considered for the purposes of manually adjusting the percent identity score. That is, only query residue positions outside the farthest N- and C-terminal residues of the subject sequence.

[0192] For example, a 90 amino acid residue subject sequence is aligned with a 100 residue query sequence to determine percent identity. The deletion occurs at the N-terminus of the subject sequence and therefore, the FASTDB alignment does not show a matching/alignment of the first 10 residues at the N-terminus. The 10 unpaired residues represent 10% of the sequence (number of residues at the N- and C-termini not matched/total number of residues in the query sequence) so 10% is subtracted from the percent identity score calculated by the FASTDB program. If the remaining 90 residues were perfectly matched the final percent identity would be 90%. In another example, a 90 residue subject sequence is compared with a 100 residue query sequence. This time the deletions are internal deletions so there are no residues at the N- or C-termini of the subject sequence which are not matched/aligned with the query. In this case the percent identity calculated by FASTDB is not manually corrected. Once again, only residue positions outside the N- and C-terminal ends of the subject sequence, as displayed in the FASTDB alignment, which are not matched/aligned with the query sequnce are manually corrected for. No other manual corrections are to made for the purposes of the present invention.

[0193] The polynucleotide variants of the invention may contain alterations in the coding regions, non-coding regions, or both. Especially preferred are polynucleotide variants containing alterations which produce silent substitutions, additions, or deletions, but do not alter the properties or activities of the encoded polypeptide. Nucleotide variants produced by silent substitutions due to the degeneracy of the genetic code are preferred. Moreover, polypeptide variants in which less than 50, less than 40, less than 30, less than 20, less than 10, or 5-50, 5-25, 5-10, 1-5, or 1-2 amino acids are substituted, deleted, or added in any combination are also preferred. Polynucleotide variants can be produced for a variety of reasons, e.g., to optimize codon expression for a particular host (change codons in the human mRNA to those preferred by a bacterial host such as E. coli).

[0194] Naturally occurring variants are called “allelic variants,” and refer to one of several alternate forms of a gene occupying a given locus on a chromosome of an organism. (Genes II, Lewin, B., ed., John Wiley & Sons, New York (1985)). These allelic variants can vary at either the polynucleotide and/or polypeptide level and are included in the present invention. Alternatively, non-naturally occurring variants may be produced by mutagenesis techniques or by direct synthesis.

[0195] Using known methods of protein engineering and recombinant DNA technology, variants may be generated to improve or alter the characteristics of the polypeptides of the present invention. For instance, one or more amino acids can be deleted from the N-terminus or C-terminus of the polypeptide of the present invention without substantial loss of biological function. As an example, Ron et al. (J. Biol. Chem. 268: 2984-2988 (1993)) reported variant KGF proteins having heparin binding activity even after deleting 3, 8, or 27 amino-terminal amino acid residues. Similarly, Interferon gamma exhibited up to ten times higher activity after deleting 8-10 amino acid residues from the carboxy terminus of this protein. (Dobeli et al., J. Biotechnology 7:199-216 (1988).)

[0196] Moreover, ample evidence demonstrates that variants often retain a biological activity similar to that of the naturally occurring protein. For example, Gayle and coworkers (J. Biol. Chem. 268:22105-22111 (1993)) conducted extensive mutational analysis of human cytokine IL-1a. They used random mutagenesis to generate over 3,500 individual IL-1a mutants that averaged 2.5 amino acid changes per variant over the entire length of the molecule. Multiple mutations were examined at every possible amino acid position. The investigators found that “[m]ost of the molecule could be altered with little effect on either [binding or biological activity].” In fact, only 23 unique amino acid sequences, out of more than 3,500 nucleotide sequences examined, produced a protein that significantly differed in activity from wild-type.

[0197] Furthermore, even if deleting one or more amino acids from the N-terminus or C-terminus of a polypeptide results in modification or loss of one or more biological functions, other biological activities may still be retained. For example, the ability of a deletion variant to induce and/or to bind antibodies which recognize the secreted form will likely be retained when less than the majority of the residues of the secreted form are removed from the N-terminus or C-terminus. Whether a particular polypeptide lacking N- or C-terminal residues of a protein retains such immunogenic activities can readily be determined by routine methods described herein and otherwise known in the art.

[0198] Thus, the invention further includes polypeptide variants which show a biological or functional activity of the polypeptides of the invention (such as, for example, activity useful in detecting, preventing, diagnosing, prognosticating, treating, and/or ameliorating diabetes mellitus). Such variants include deletions, insertions, inversions, repeats, and substitutions selected according to general rules known in the art so as have little effect on activity.

[0199] The present application is directed to nucleic acid molecules at least 80%, 85%, 90%, 95%, 96%, 97%, 98%, 99% or 100% identical to the nucleic acid sequences disclosed herein, (e.g., encoding a polypeptide having the amino acid sequence of an N and/or C terminal deletion), irrespective of whether they encode a polypeptide having functional activity. This is because even where a particular nucleic acid molecule does not encode a polypeptide having functional activity, one of skill in the art would still know how to use the nucleic acid molecule, for instance, as a hybridization probe or a polymerase chain reaction (PCR) primer. Uses of the nucleic acid molecules of the present invention that do not encode a polypeptide having functional activity include, inter alia, (1) isolating a gene or allelic or splice variants thereof in a cDNA library; (2) in situ hybridization (e.g., “FISH”) to metaphase chromosomal spreads to provide precise chromosomal location of the gene, as described in Verma et al., Human Chromosomes: A Manual of Basic Techniques, Pergamon Press, New York (1988); (3) Northern Blot analysis for detecting mRNA expression in specific tissues (e.g., normal or diseased tissues); and (4) in situ hybridization (e.g., histochemistry) for detecting mRNA expression in specific tissues (e.g., normal or diseased tissues).

[0200] Preferred, however, are nucleic acid molecules having sequences at least 80%, 85%, 90%, 95%, 96%, 97%, 98%, 99% or 100% identical to the nucleic acid sequences disclosed herein, which do, in fact, encode a polypeptide having functional activity. By a polypeptide having “functional activity” is meant, a polypeptide capable of displaying one or more known functional activities associated with a full-length (complete) protein and/or a mature (secreted) protein of the invention. Such functional activities include, but are not limited to, biological activity (such as, for example, activity useful in detecting, preventing, diagnosing, prognosticating, treating, and/or ameliorating diabetes mellitus), antigenicity (ability to bind, or compete with a polypeptide of the invention for binding, to an anti-polypeptide of the invention antibody), immunogenicity (ability to generate antibody which binds to a specific polypeptide of the invention), ability to form multimers with polypeptides of the invention, and ability to bind to a receptor or ligand for a polypeptide of the invention.

[0201] The functional activity of the polypeptides, and fragments, variants and derivatives of the invention, can be assayed by various methods.

[0202] For example, in one embodiment where one is assaying for the ability to bind or compete with a full-length polypeptide of the present invention for binding to an anti-polypetide antibody, various immunoassays known in the art can be used, including but not limited to, competitive and non-competitive assay systems using techniques such as radioimmunoassays, ELISA (enzyme linked immunosorbent assay), “sandwich” immunoassays, immunoradiometric assays, gel diffusion precipitation reactions, immunodiffusion assays, in situ immunoassays (using colloidal gold, enzyme or radioisotope labels, for example), western blots, precipitation reactions, agglutination assays (e.g., gel agglutination assays, hemagglutination assays), complement fixation assays, immunofluorescence assays, protein A assays, and immunoelectrophoresis assays, etc. In one embodiment, antibody binding is detected by detecting a label on the primary antibody. In another embodiment, the primary antibody is detected by detecting binding of a secondary antibody or reagent to the primary antibody. In a further embodiment, the secondary antibody is labeled. Many means are known in the art for detecting binding in an immunoassay and are within the scope of the present invention.

[0203] In another embodiment, where a ligand is identified, or the ability of a polypeptide fragment, variant or derivative of the invention to multimerize is being evaluated, binding can be assayed, e.g., by means well-known in the art, such as, for example, reducing and non-reducing gel chromatography, protein affinity chromatography, and affinity blotting. See generally, Phizicky et al., Microbiol. Rev. 59:94-123 (1995). In another embodiment, the ability of physiological correlates of a polypeptide of the present invention to bind to a substrate(s) of the polypeptide of the invention can be routinely assayed using techniques known in the art.

[0204] In addition, assays described herein (see Examples) and otherwise known in the art may routinely be applied to measure the ability of polypeptides of the present invention and fragments, variants and derivatives thereof to elicit polypeptide related biological activity (either in vitro or in vivo). Other methods will be known to the skilled artisan and are within the scope of the invention.

[0205] Of course, due to the degeneracy of the genetic code, one of ordinary skill in the art will immediately recognize that a large number of the nucleic acid molecules having a sequence at least 80%, 85%, 90%, 95%, 96%, 97%, 98%, 99%, or 100% identical to, for example, the nucleic acid sequence of the cDNA contained in ATCC Deposit No:Z, the nucleic acid sequence referred to in Table 1B (SEQ ID NO:X), the nucleic acid sequence disclosed in Table 1A (e.g., the nucleic acid sequence delineated in columns 7 and 8), the nucleic acid sequence disclosed in Table 2 (e.g., the nucleic acid sequence delineated in columns 8 and 9) or fragments thereof, will encode polypeptides “having functional activity.” In fact, since degenerate variants of any of these nucleotide sequences all encode the same polypeptide, in many instances, this will be clear to the skilled artisan even without performing the above described comparison assay. It will be further recognized in the art that, for such nucleic acid molecules that are not degenerate variants, a reasonable number will also encode a polypeptide having functional activity. This is because the skilled artisan is fully aware of amino acid substitutions that are either less likely or not likely to significantly effect protein function (e.g., replacing one aliphatic amino acid with a second aliphatic amino acid), as further described below.

[0206] For example, guidance concerning how to make phenotypically silent amino acid substitutions is provided in Bowie et al., “Deciphering the Message in Protein Sequences: Tolerance to Amino Acid Substitutions,” Science 247:1306-1310 (1990), wherein the authors indicate that there are two main strategies for studying the tolerance of an amino acid sequence to change.

[0207] The first strategy exploits the tolerance of amino acid substitutions by natural selection during the process of evolution. By comparing amino acid sequences in different species, conserved amino acids can be identified. These conserved amino acids are likely important for protein function. In contrast, the amino acid positions where substitutions have been tolerated by natural selection indicates that these positions are not critical for protein function. Thus, positions tolerating amino acid substitution could be modified while still maintaining biological activity of the protein.

[0208] The second strategy uses genetic engineering to introduce amino acid changes at specific positions of a cloned gene to identify regions critical for protein function. For example, site directed mutagenesis or alanine-scanning mutagenesis (introduction of single alanine mutations at every residue in the molecule) can be used. See Cunningham and Wells, Science 244:1081-1085 (1989). The resulting mutant molecules can then be tested for biological activity.

[0209] As the authors state, these two strategies have revealed that proteins are surprisingly tolerant of amino acid substitutions. The authors further indicate which amino acid changes are likely to be permissive at certain amino acid positions in the protein. For example, most buried (within the tertiary structure of the protein) amino acid residues require nonpolar side chains, whereas few features of surface side chains are generally conserved. Moreover, tolerated conservative amino acid substitutions involve replacement of the aliphatic or hydrophobic amino acids Ala, Val, Leu and Ile; replacement of the hydroxyl residues Ser and Thr; replacement of the acidic residues Asp and Glu; replacement of the amide residues Asn and Gln, replacement of the basic residues Lys, Arg, and His; replacement of the aromatic residues Phe, Tyr, and Trp, and replacement of the small-sized amino acids Ala, Ser, Thr, Met, and Gly.

[0210] Besides conservative amino acid substitution, variants of the present invention include (i) substitutions with one or more of the non-conserved amino acid residues, where the substituted amino acid residues may or may not be one encoded by the genetic code, or (ii) substitutions with one or more of the amino acid residues having a substituent group, or (iii) fusion of the mature polypeptide with another compound, such as a compound to increase the stability and/or solubility of the polypeptide (for example, polyethylene glycol), (iv) fusion of the polypeptide with additional amino acids, such as, for example, an IgG Fc fusion region peptide, serum albumin (preferably human serum albumin) or a fragment thereof, or leader or secretory sequence, or a sequence facilitating purification, or (v) fusion of the polypeptide with another compound, such as albumin (including but not limited to recombinant albumin (see, e.g., U.S. Pat. No. 5,876,969, issued Mar. 2, 1999, EP Patent 0 413 622, and U.S. Pat. No. 5,766,883, issued Jun. 16, 1998, herein incorporated by reference in their entirety)). Such variant polypeptides are deemed to be within the scope of those skilled in the art from the teachings herein.

[0211] For example, polypeptide variants containing amino acid substitutions of charged amino acids with other charged or neutral amino acids may produce proteins with improved characteristics, such as less aggregation. Aggregation of pharmaceutical formulations both reduces activity and increases clearance due to the aggregate's immunogenic activity. See Pinckard et al., Clin. Exp. Immunol. 2:331-340 (1967); Robbins et al., Diabetes 36: 838-845 (1987); Cleland et al., Crit. Rev. Therapeutic Drug Carrier Systems 10:307-377 (1993).

[0212] A further embodiment of the invention relates to polypeptides which comprise the amino acid sequence of a polypeptide having an amino acid sequence which contains at least one amino acid substitution, but not more than 50 amino acid substitutions, even more preferably, not more than 40 amino acid substitutions, still more preferably, not more than 30 amino acid substitutions, and still even more preferably, not more than 20 amino acid substitutions from a polypeptide sequence disclosed herein. Of course it is highly preferable for a polypeptide to have an amino acid sequence which, for example, comprises the amino acid sequence of a polypeptide of SEQ ID NO:Y, the amino acid sequence of the mature (e.g., secreted) polypeptide of SEQ ID NO:Y, an amino acid sequence encoded by SEQ ID NO:X, an amino acid sequence encoded by the portion of SEQ ID NO:X as defined in columnns 8 and 9 of Table 2, an amino acid sequence encoded by the complement of SEQ ID NO:X, an amino acid sequence encoded by cDNA contained in ATCC Deposit No:Z, and/or the amino acid sequence of a mature (secreted) polypeptide encoded by cDNA contained in ATCC Deposit No:Z, or a fragment thereof, which contains, in order of ever-increasing preference, at least one, but not more than 10, 9, 8, 7, 6, 5, 4, 3, 2 or 1 amino acid substitutions.

[0213] In specific embodiments, the polypeptides of the invention comprise, or alternatively, consist of, fragments or variants of a reference amino acid sequence selected from: (a) the amino acid sequence of SEQ ID NO:Y or fragments thereof (e.g., the mature form and/or other fragments described herein); (b) the amino acid sequence encoded by SEQ ID NO:X or fragments thereof; (c) the amino acid sequence encoded by the complement of SEQ ID NO:X or fragments thereof; (d) the amino acid sequence encoded by the portion of SEQ ID NO:X as defined in columns 8 and 9 of Table 2 or fragments thereof, and (e) the amino acid sequence encoded by cDNA contained in ATCC Deposit No:Z or fragments thereof; wherein the fragments or variants have 1-5, 5-10, 5-25, 5-50, 10-50 or 50-150, amino acid residue additions, substitutions, and/or deletions when compared to the reference amino acid sequence. In preferred embodiments, the amino acid substitutions are conservative. Polynucleotides encoding these polypeptides are also encompassed by the invention.

[0214] Polynucleotide and Polypeptide Fragments

[0215] The present invention is also directed to polynucleotide fragments of the polynucleotides (nucleic acids) of the invention. In the present invention, a “polynucleotide fragment” refers to a polynucleotide having a nucleic acid sequence which, for example: is a portion of the cDNA contained in ATCC Deposit No:Z or the complementary strand thereto; is a portion of the polynucleotide sequence encoding the polypeptide encoded by the cDNA contained in ATCC Deposit No:Z or the complementary strand thereto; is a portion of the polynucleotide sequence encoding the mature (secreted) polypeptide encoded by the cDNA contained in ATCC Deposit No:Z or the complementary strand thereto; is a portion of a polynucleotide sequence encoding the mature amino acid sequence as defined in columns 14 and 15 of Table 1A or the complementary strand thereto; is a portion of a polynucleotide sequence encoding the amino acid sequence encoded by the region of SEQ ID NO:X as defined in columns 8 and 9 of Table 2 or the complementary strand thereto; is a portion of the polynucleotide sequence of SEQ ID NO:X as defined in columns 8 and 9 of Table 2 or the complementary strand thereto; is a portion of the polynucleotide sequence in SEQ ID NO:X or the complementary strand thereto; is a polynucleotide sequence encoding a portion of the polypeptide of SEQ ID NO:Y; is a polynucleotide sequence encoding a portion of a polypeptide encoded by SEQ ID NO:X; is a polynucleotide sequence encoding a portion of a polypeptide encoded by the complement of the polynucleotide sequence in SEQ ID NO:X; is a portion of a polynucleotide sequence encoding the amino acid sequence encoded by the region of SEQ ID NO:B as defined in column 6 of Table 1C or the complementary strand thereto; or is a portion of the polynucleotide sequence of SEQ ID NO:B as defined in column 6 of Table 1C or the complementary strand thereto.

[0216] The polynucleotide fragments of the invention are preferably at least about 15 nt, and more preferably at least about 20 nt, still more preferably at least about 30 nt, and even more preferably, at least about 40 nt, at least about 50 nt, at least about 75 nt, or at least about 150 nt in length. A fragment “at least 20 nt in length,” for example, is intended to include 20 or more contiguous bases from the cDNA sequence contained in ATCC Deposit No:Z, or the nucleotide sequence shown in SEQ ID NO:X or the complementary stand thereto. In this context “about” includes the particularly recited value or a value larger or smaller by several (5, 4, 3, 2, or 1) nucleotides, at either terminus or at both termini. These nucleotide fragments have uses that include, but are not limited to, as diagnostic probes and primers as discussed herein. Of course, larger fragments (e.g., at least 160, 170, 180, 190, 200, 250, 500, 600, 1000, or 2000 nucleotides in length) are also encompassed by the invention.

[0217] Moreover, representative examples of polynucleotide fragments of the invention comprise, or alternatively consist of, a sequence from about nucleotide number 1-50, 51-100, 101-150, 151-200, 201-250, 251-300, 301-350, 351-400, 401-450, 451-500, 501-550, 551-600, 601-650, 651-700, 701-750, 751-800, 801-850, 851-900, 901-950, 951-1000, 1001-1050, 1051-1100, 1101-1150, 1151-1200, 1201-1250, 1251-1300, 1301-1350, 1351-1400, 1401-1450, 1451-1500, 1501-1550, 1551-1600, 1601-1650, 1651-1700, 1701-1750, 1751-1800, 1801-1850, 1851-1900, 1901-1950, 1951-2000, 2001-2050, 2051-2100, 2101-2150, 2151-2200, 2201-2250, 2251-2300, 2301-2350, 2351-2400, 2401-2450, 2451-2500, 2501-2550, 2551-2600, 2601-2650, 2651-2700, 2701-2750, 2751-2800, 2801-2850, 2851-2900, 2901-2950, 2951-3000, 3001-3050, 3051-3100, 3101-3150, 3151-3200, 3201-3250, 3251-3300, 3301-3350, 3351-3400, 3401-3450, 3451-3500, 3501-3550, 3551-3600, 3601-3650, 3651-3700, 3701-3750, 3751-3800, 3801-3850, 3851-3900, 3901-3950, 3951-4000, 4001-4050, 4051-4100, 4101-4150, 4151-4200, 4201-4250, 4251-4300, 4301-4350, 4351-4400, 4401-4450, 4451-4500, 4501-4550, 4551-4600, 4601-4650, 4651-4700, 4701-4750, 4751-4800, 4801-4850, 4851-4900, 4901-4950, 4951-5000, 5001-5050, 5051-5100, 5101-5150, 5151-5200, 5201-5250, 5251-5300, 5301-5350, 5351-5400, 5401-5450, 5451-5500, 5501-5550, 5551-5600, 5601-5650, 5651-5700, 5701-5750, 5751-5800, 5801-5850, 5851-5900, 5901-5950, 5951-6000, 6001-6050, 6051-6100, 6101-6150, 6151-6200, 6201-6250, 6251-6300, 6301-6350, 6351-6400, 6401-6450, 6451-6500, 6501-6550, 6551-6600, 6601-6650, 6651-6700, 6701-6750, 6751-6800, 6801-6850, 6851-6900, 6901-6950, 6951-7000, 7001-7050, 7051-7100, 7101-7150, 7151-7200, 7201-7250, 7251-7300 or 7301 to the end of SEQ ID NO:X, or the complementary strand thereto. In this context “about” includes the particularly recited range or a range larger or smaller by several (5, 4, 3, 2, or 1) nucleotides, at either terminus or at both termini. Preferably, these fragments encode a polypeptide which has a functional activity (e.g., biological activity; such as, for example, activity useful in detecting, preventing, diagnosing, prognosticating, treating, and/or ameliorating diabetes mellitus). More preferably, these polynucleotides can be used as probes or primers as discussed herein. Polynucleotides which hybridize to one or more of these polynucleotides under stringent hybridization conditions or alternatively, under lower stringency conditions are also encompassed by the invention, as are polypeptides encoded by these polynucleotides.

[0218] Further representative examples of polynucleotide fragments of the invention comprise, or alternatively consist of, a sequence from about nucleotide number 1-50, 51-100, 101-150, 151-200, 201-250, 251-300, 301-350, 351-400, 401-450, 451-500, 501-550, 551-600, 601-650, 651-700, 701-750, 751-800, 801-850, 851-900, 901-950, 951-1000, 1001-1050, 1051-1100, 1101-1150, 1151-1200, 1201-1250, 1251-1300, 1301-1350, 1351-1400, 1401-1450, 1451-1500, 1501-1550, 1551-1600, 1601-1650, 1651-1700, 1701-1750, 1751-1800, 1801-1850, 1851-1900, 1901-1950, 1951-2000, 2001-2050, 2051-2100, 2101-2150, 2151-2200, 2201-2250, 2251-2300, 2301-2350, 2351-2400, 2401-2450, 2451-2500, 2501-2550, 2551-2600, 2601-2650, 2651-2700, 2701-2750, 2751-2800, 2801-2850, 2851-2900, 2901-2950, 2951-3000, 3001-3050, 3051-3100, 3101-3150, 3151-3200, 3201-3250, 3251-3300, 3301-3350, 3351-3400, 3401-3450, 3451-3500, 3501-3550, 3551-3600, 3601-3650, 3651-3700, 3701-3750, 3751-3800, 3801-3850, 3851-3900, 3901-3950, 3951-4000, 4001-4050, 4051-4100, 4101-4150, 4151-4200, 4201-4250, 4251-4300, 4301-4350, 4351-4400, 4401-4450, 4451-4500, 4501-4550, 4551-4600, 4601-4650, 4651-4700, 4701-4750, 4751-4800, 4801-4850, 4851-4900, 4901-4950, 4951-5000, 5001-5050, 5051-5100, 5101-5150, 5151-5200, 5201-5250, 5251-5300, 5301-5350, 5351-5400, 5401-5450, 5451-5500, 5501-5550, 5551-5600, 5601-5650, 5651-5700, 5701-5750, 5751-5800, 5801-5850, 5851-5900, 5901-5950, 5951-6000, 6001-6050, 6051-6100, 6101-6150, 6151-6200, 6201-6250, 6251-6300, 6301-6350, 6351-6400, 6401-6450, 6451-6500, 6501-6550, 6551-6600, 6601-6650, 6651-6700, 6701-6750, 6751-6800, 6801-6850, 6851-6900, 6901-6950, 6951-7000, 7001-7050, 7051-7100, 7101-7150, 7151-7200, 7201-7250, 7251-7300 or 7301 to the end of the cDNA sequence contained in ATCC Deposit No:Z, or the complementary strand thereto. In this context “about” includes the particularly recited range or a range larger or smaller by several (5, 4, 3, 2, or 1) nucleotides, at either terminus or at both termini. Preferably, these fragments encode a polypeptide which has a functional activity (e.g., biological activity). More preferably, these polynucleotides can be used as probes or primers as discussed herein. Polynucleotides which hybridize to one or more of these polynucleotides under stringent hybridization conditions or alternatively, under lower stringency conditions are also encompassed by the invention, as are polypeptides encoded by these polynucleotides.

[0219] Moreover, representative examples of polynucleotide fragments of the invention comprise, or alternatively consist of, a nucleic acid sequence comprising one, two, three, four, five, six, seven, eight, nine, ten, or more of the above described polynucleotide fragments of the invention in combination with a polynucleotide sequence delineated in Table 1C column 6. Additional, representative examples of polynucleotide fragments of the invention comprise, or alternatively consist of, a nucleic acid sequence comprising one, two, three, four, five, six, seven, eight, nine, ten, or more of the above described polynucleotide fragments of the invention in combination with a polynucleotide sequence that is the complementary strand of a sequence delineated in column 6 of Table 1C. In further embodiments, the above-described polynucleotide fragments of the invention comprise, or alternatively consist of, sequences delineated in Table 1C, column 6, and have a nucleic acid sequence which is different from that of the BAC fragment having the sequence disclosed in SEQ ID NO:B (see Table 1C, column 5). In additional embodiments, the above-described polynucleotide fragments of the invention comprise, or alternatively consist of, sequences delineated in Table 1C, column 6, and have a nucleic acid sequence which is different from that published for the BAC clone identified as BAC ID NO:A (see Table 1C, column 4). In additional embodiments, the above-described polynucleotides of the invention comprise, or alternatively consist of, sequences delineated Table 1C, column 6, and have a nucleic acid sequence which is different from that contained in the BAC clone identified as BAC ID NO:A (see Table 1C, column 4). Polypeptides encoded by these polynucleotides, other polynucleotides that encode these polypeptides, and antibodies that bind these polypeptides are also encompassed by the invention. Additionally, fragments and variants of the above-described polynucleotides and polypeptides are also encompassed by the invention.

[0220] In additional specific embodiments, polynucleotides of the invention comprise, or alternatively consist of, one, two, three, four, five, six, seven, eight, nine, ten, or more fragments of the sequences delineated in column 6 of Table 1C, and the polynucleotide sequence of SEQ ID NO:X (e.g., as defined in Table 1C, column 2) or fragments or variants thereof. Polypeptides encoded by these polynucleotides, other polynucleotides that encode these polypeptides, and antibodies that bind these polypeptides are also encompassed by the invention.

[0221] In additional specific embodiments, polynucleotides of the invention comprise, or alternatively consist of, one, two, three, four, five, six, seven, eight, nine, ten, or more fragments of the sequences delineated in column 6 of Table 1C which correspond to the same ATCC Deposit No:Z (see Table 1C, column 1), and the polynucleotide sequence of SEQ ID NO:X (e.g., as defined in Table 1A, 1B, or 1C) or fragments or variants thereof. Polypeptides encoded by these polynucleotides, other polynucleotides that encode these polypeptides, and antibodies that bind these polypeptides are also encompassed by the invention.

[0222] In further specific embodiments, polynucleotides of the invention comprise, or alternatively consist of, one, two, three, four, five, six, seven, eight, nine, ten, or more fragments of the sequences delineated in the same row of column 6 of Table 1C, and the polynucleotide sequence of SEQ ID NO:X (e.g., as defined in Table 1A, 1B, or 1C) or fragments or variants thereof. Polypeptides encoded by these polynucleotides, other polynucleotides that encode these polypeptides, and antibodies that bind these polypeptides are also encompassed by the invention.

[0223] In additional specific embodiments, polynucleotides of the invention comprise, or alternatively consist of a polynucleotide sequence in which the 3′ 10 polynucleotides of one of the sequences delineated in column 6 of Table 1C and the 5′ 10 polynucleotides of the sequence of SEQ ID NO:X are directly contiguous. Nucleic acids which hybridize to the complement of these 20 contiguous polynucleotides under stringent hybridization conditions or alternatively, under lower stringency conditions, are also encompassed by the invention. Polypeptides encoded by these polynucleotides and/or nucleic acids, other polynucleotides and/or nucleic acids that encode these polypeptides, and antibodies that bind these polypeptides are also encompassed by the invention. Additionally, fragments and variants of the above-described polynucleotides, nucleic acids, and polypeptides are also encompassed by the invention.

[0224] In additional specific embodiments, polynucleotides of the invention comprise, or alternatively consist of a polynucleotide sequence in which the 3′ 10 polynucleotides of one of the sequences delineated in column 6 of Table 1C and the 5′ 10 polynucleotides of a fragment or variant of the sequence of SEQ ID NO:X (e.g., as described herein) are directly contiguous Nucleic acids which hybridize to the complement of these 20 contiguous polynucleotides under stringent hybridization conditions or alternatively, under lower stringency conditions, are also encompassed by the invention. Polypeptides encoded by these polynucleotides and/or nucleic acids, other polynucleotides and/or nucleic acids encoding these polypeptides, and antibodies that bind these polypeptides are also encompassed by the invention. Additionally, fragments and variants of the above-described polynucleotides, nucleic acids, and polypeptides are also encompassed by the invention.

[0225] In further specific embodiments, polynucleotides of the invention comprise, or alternatively consist of a polynucleotide sequence in which the 3′ 10 polynucleotides of a fragment or variant of the sequence of SEQ ID NO:X and the 5′ 10 polynucleotides of the sequence of one of the sequences delineated in column 6 of Table 1C are directly contiguous. Nucleic acids which hybridize to the complement of these 20 contiguous polynucleotides under stringent hybridization conditions or alternatively, under lower stringency conditions, are also encompassed by the invention. Polypeptides encoded by these polynucleotides and/or nucleic acids, other polynucleotides and/or nucleic acids encoding these polypeptides, and antibodies that bind these polypeptides are also encompassed by the invention. Additionally, fragments and variants of the above-described polynucleotides, nucleic acids, and polypeptides are also encompassed by the invention.

[0226] In specific embodiments, polynucleotides of the invention comprise, or alternatively consist of a polynucleotide sequence in which the 3′ 10 polynucleotides of one of the sequences delineated in column 6 of Table 1C and the 5′ 10 polynucleotides of another sequence in column 6 are directly contiguous. In preferred embodiments, the 3′ 10 polynucleotides of one of the sequences delineated in column 6 of Table 1C is directly contiguous with the 5′ 10 polynucleotides of the next sequential exon delineated in Table 1C, column 6. Nucleic acids which hybridize to the complement of these 20 contiguous polynucleotides under stringent hybridization conditions or alternatively, under lower stringency conditions, are also encompassed by the invention. Polypeptides encoded by these polynucleotides and/or nucleic acids, other polynucleotides and/or nucleic acids encoding these polypeptides, and antibodies that bind these polypeptides are also encompassed by the invention. Additionally, fragments and variants of the above-described polynucleotides, nucleic acids, and polypeptides are also encompassed by the invention.

[0227] In the present invention, a “polypeptide fragment” refers to an amino acid sequence which is a portion of the amino acid sequence contained in SEQ ID NO:Y, is a portion of the mature form of SEQ ID NO:Y as defined in columns 14 and 15 of Table 1A, a portion of an amino acid sequence encoded by the portion of SEQ ID NO:X as defined in columnns 8 and 9 of Table 2, is a portion of an amino acid sequence encoded by the polynucleotide sequence of SEQ ID NO:X, is a portion of an amino acid sequence encoded by the complement of the polynucleotide sequence in SEQ ID NO:X, is a portion of the amino acid sequence of a mature (secreted) polypeptide encoded by the cDNA contained in ATCC Deposit No:Z, and/or is a portion of an amino acid sequence encoded by the cDNA contained in ATCC Deposit No:Z. Protein (polypeptide) fragments may be “free-standing,” or comprised within a larger polypeptide of which the fragment forms a part or region, most preferably as a single continuous region. Representative examples of polypeptide fragments of the invention, include, for example, fragments comprising, or alternatively consisting of, from about amino acid number 1-20, 21-40, 41-60, 61-80, 81-100, 101-120, 121-140, 141-160, 161-180, 181-200, 201-220, 221-240, 241-260, 261-280, 281-300, 301-320, 321-340, 341-360, 361-380, 381-400, 401-420, 421-440, 441-460, 461-480, 481-500, 501-520, 521-540, 541-560, 561-580, 581-600, 601-620, 621-640, 641-660, 661-680, 681-700, 701-720, 721-740, 741-760, 761-780, 781-800, 801-820, 821-840, 841-860, 861-880, 881-900, 901-920, 921-940, 941-960, 961-980, 981-1000, 1001-1020, 1021-1040, 1041-1060, 1061-1080, 1081-1100, 1101-1120, 1121-1140, 1141-1160, 1161-1180, 1181-1200, 1201-1220, 1221-1240, 1241-1260, 1261-1280, 1281-1300, 1301-1320, 1321-1340, 1341-1360, 1361-1380, 1381-1400, 1401-1420, 1421-1440, or 1441 to the end of the coding region of cDNA and SEQ ID NO: Y. In a preferred embodiment, polypeptide fragments of the invention include, for example, fragments comprising, or alternatively consisting of, from about amino acid number 1-20, 21-40, 41-60, 61-80, 81-100, 101-120, 121-140, 141-160, 161-180, 181-200, 201-220, 221-240, 241-260, 261-280, 281-300, 301-320, 321-340, 341-360, 361-380, 381-400, 401-420, 421-440, 441-460, 461-480, 481-500, 501-520, 521-540, 541-560, 561-580, 581-600, 601-620, 621-640, 641-660, 661-680, 681-700, 701-720, 721-740, 741-760, 761-780, 781-800, 801-820, 821-840, 841-860, 861-880, 881-900, 901-920, 921-940, 941-960, 961-980, 981-1000, 1001-1020, 1021-1040, 1041-1060, 1061-1080, 1081-1100, 1101-1120, 1121-1140, 1141-1160, 1161-1180, 1181-1200, 1201-1220, 1221-1240, 1241-1260, 1261-1280, 1281-1300, 1301-1320, 1321-1340, 1341-1360, 1361-1380, 1381-1400, 1401-1420, 1421-1440, or 1441 to the end of the coding region of SEQ ID NO:Y. Moreover, polypeptide fragments of the invention may be at least about 10, 15, 20, 25, 30, 35, 40, 45, 50, 55, 60, 65, 70, 75, 80, 85, 90, 100, 110, 120, 130, 140, or 150 amino acids in length. In this context “about” includes the particularly recited ranges or values, or ranges or values larger or smaller by several (5, 4, 3, 2, or 1) amino acids, at either extreme or at both extremes. Polynucleotides encoding these polypeptide fragments are also encompassed by the invention.

[0228] Even if deletion of one or more amino acids from the N-terminus of a protein results in modification of loss of one or more biological functions of the protein, other functional activities (e.g., biological activities; such as, for example, activity useful in detecting, preventing, diagnosing, prognosticating, treating, and/or ameliorating diabetes mellitus; ability to multimerize; ability to bind a ligand; antigenic ability useful for production of polypeptide specific antibodies) may still be retained. For example, the ability of shortened muteins to induce and/or bind to antibodies which recognize the complete or mature forms of the polypeptides generally will be retained when less than the majority of the residues of the complete or mature polypeptide are removed from the N-terminus. Whether a particular polypeptide lacking N-terminal residues of a complete polypeptide retains such immunologic activities can readily be determined by routine methods described herein and otherwise known in the art. It is not unlikely that a mutein with a large number of deleted N-terminal amino acid residues may retain some biological or immunogenic activities. In fact, peptides composed of as few as six amino acid residues may often evoke an immune response.

[0229] Accordingly, polypeptide fragments include the secreted protein as well as the mature form. Further preferred polypeptide fragments include the secreted protein or the mature form having a continuous series of deleted residues from the amino or the carboxy terminus, or both. For example, any number of amino acids, ranging from 1-60, can be deleted from the amino terminus of either the secreted polypeptide or the mature form. Similarly, any number of amino acids, ranging from 1-30, can be deleted from the carboxy terminus of the secreted protein or mature form. Furthermore, any combination of the above amino and carboxy terminus deletions are preferred. Similarly, polynucleotides encoding these polypeptide fragments are also preferred.

[0230] The present invention further provides polypeptides having one or more residues deleted from the amino terminus of the amino acid sequence of a polypeptide disclosed herein (e.g., a polypeptide of SEQ ID NO:Y, a polypeptide as defined in columns 14 and 15 of Table 1A, a polypeptide encoded by the polynucleotide sequence contained in SEQ ID NO:X or the complement thereof, a polypeptide encoded by the portion of SEQ ID NO:X as defined in columns 8 and 9 of Table 2, a polypeptide encoded by the portion of SEQ ID NO:B as defined in column 6 of Table 1C, a polypeptide encoded by the cDNA contained in ATCC Deposit No:Z, and/or a mature polypeptide encoded by the cDNA contained in ATCC Deposit No:Z). In particular, N-terminal deletions may be described by the general formula m-q, where q is a whole integer representing the total number of amino acid residues in a polypeptide of the invention (e.g., the polypeptide disclosed in SEQ ID NO:Y, the mature (secreted) portion of SEQ ID NO:Y as defined in columns 14 and 15 of Table 1A, or the polypeptide encoded by the portion of SEQ ID NO:X as defined in columns 8 and 9 of Table 2), and m is defined as any integer ranging from 2 to q-6. Polynucleotides encoding these polypeptides are also encompassed by the invention.

[0231] The present invention further provides polypeptides having one or more residues from the carboxy terminus of the amino acid sequence of a polypeptide disclosed herein (e.g., a polypeptide of SEQ ID NO:Y, the mature (secreted) portion of SEQ ID NO:Y as defined in columns 14 and 15 of Table 1A, a polypeptide encoded by the polynucleotide sequence contained in SEQ ID NO:X, a polypeptide encoded by the portion of SEQ ID NO:X as defined in columns 8 and 9 of Table 2, a polypeptide encoded by the portion of SEQ ID NO:B as defined in column 6 of Table 1C, a polypeptide encoded by the cDNA contained in ATCC Deposit No:Z, and/or a mature polypeptide encoded by the cDNA contained in ATCC Deposit No:Z). In particular, C-terminal deletions may be described by the general formula l−n, where n is any whole integer ranging from 6 to q−1, and where n corresponds to the position of amino acid residue in a polypeptide of the invention. Polynucleotides encoding these polypeptides are also encompassed by the invention.

[0232] In addition, any of the above described N- or C-terminal deletions can be combined to produce a N- and C-terminal deleted polypeptide. The invention also provides polypeptides having one or more amino acids deleted from both the amino and the carboxyl termini, which may be described generally as having residues m-n of a polypeptide encoded by SEQ ID NO:X (e.g., including, but not limited to, the preferred polypeptide disclosed as SEQ ID NO:Y, the mature (secreted) portion of SEQ ID NO:Y as defined in columns 14 and 15 of Table 1A, and the polypeptide encoded by the portion of SEQ ID NO:X as defined in columns 8 and 9 of Table 2), the cDNA contained in ATCC Deposit No:Z, and/or the complement thereof, where n and m are integers as described above. Polynucleotides encoding these polypeptides are also encompassed by the invention.

[0233] Also as mentioned above, even if deletion of one or more amino acids from the C-terminus of a protein results in modification of loss of one or more biological functions of the protein, other functional activities (e.g., biological activities such as, for example, activity useful in detecting, preventing, diagnosing, prognosticating, treating, and/or ameliorating diabetes mellitus; ability to multimerize; ability to bind a ligand; antigenic ability useful for production of polypeptide specific antibodies) may still be retained. For example the ability of the shortened mutein to induce and/or bind to antibodies which recognize the complete or mature forms of the polypeptide generally will be retained when less than the majority of the residues of the complete or mature polypeptide are removed from the C-terminus. Whether a particular polypeptide lacking C-terminal residues of a complete polypeptide retains such immunologic activities can readily be determined by routine methods described herein and otherwise known in the art. It is not unlikely that a mutein with a large number of deleted C-terminal amino acid residues may retain some biological or immunogenic activities. In fact, peptides composed of as few as six amino acid residues may often evoke an immune response.

[0234] The present application is also directed to proteins containing polypeptides at least 80%, 85%, 90%, 95%, 96%, 97%, 98% or 99% identical to a polypeptide sequence set forth herein. In preferred embodiments, the application is directed to proteins containing polypeptides at least 80%, 85%, 90%, 95%, 96%, 97%, 98% or 99% identical to polypeptides having the amino acid sequence of the specific N- and C-terminal deletions. Polynucleotides encoding these polypeptides are also encompassed by the invention.

[0235] Any polypeptide sequence encoded by, for example, the polynucleotide sequences set forth as SEQ ID NO:X or the complement thereof, (presented, for example, in Tables 1A and 2), the cDNA contained in ATCC Deposit No:Z, or the polynucleotide sequence as defined in column 6 of Table 1C, may be analyzed to determine certain preferred regions of the polypeptide. For example, the amino acid sequence of a polypeptide encoded by a polynucleotide sequence of SEQ ID NO:X (e.g., the polypeptide of SEQ ID NO:Y and the polypeptide encoded by the portion of SEQ ID NO:X as defined in columnns 8 and 9 of Table 2) or the cDNA contained in ATCC Deposit No:Z may be analyzed using the default parameters of the DNASTAR computer algorithm (DNASTAR, Inc., 1228 S. Park St., Madison, Wis. 53715 USA; http://www.dnastar.com/).

[0236] Polypeptide regions that may be routinely obtained using the DNASTAR computer algorithm include, but are not limited to, Garnier-Robson alpha-regions, beta-regions, turn-regions, and coil-regions; Chou-Fasman alpha-regions, beta-regions, and turn-regions; Kyte-Doolittle hydrophilic regions and hydrophobic regions; Eisenberg alpha- and beta-amphipathic regions; Karplus-Schulz flexible regions; Emini surface-forming regions; and Jameson-Wolf regions of high antigenic index. Among highly preferred polynucleotides of the invention in this regard are those that encode polypeptides comprising regions that combine several structural features, such as several (e.g., 1, 2, 3 or 4) of the features set out above.

[0237] Additionally, Kyte-Doolittle hydrophilic regions and hydrophobic regions, Emini surface-forming regions, and Jameson-Wolf regions of high antigenic index (i.e., containing four or more contiguous amino acids having an antigenic index of greater than or equal to 1.5, as identified using the default parameters of the Jameson-Wolf program) can routinely be used to determine polypeptide regions that exhibit a high degree of potential for antigenicity. Regions of high antigenicity are determined from data by DNASTAR analysis by choosing values which represent regions of the polypeptide which are likely to be exposed on the surface of the polypeptide in an environment in which antigen recognition may occur in the process of initiation of an immune response.

[0238] Preferred polypeptide fragments of the invention are fragments comprising, or alternatively, consisting of, an amino acid sequence that displays a functional activity (e.g. biological activity such as, for example, activity useful in detecting, preventing, diagnosing, prognosticating, treating, and/or ameliorating diabetes mellitus; ability to multimerize; ability to bind a ligand; antigenic ability useful for production of polypeptide specific antibodies) of the polypeptide sequence of which the amino acid sequence is a fragment. By a polypeptide displaying a “functional activity” is meant a polypeptide capable of one or more known functional activities associated with a full-length protein, such as, for example, biological activity, antigenicity, immunogenicity, and/or multimerization, as described herein.

[0239] Other preferred polypeptide fragments are biologically active fragments. Biologically active fragments are those exhibiting activity similar, but not necessarily identical, to an activity of the polypeptide of the present invention. The biological activity of the fragments may include an improved desired activity, or a decreased undesirable activity.

[0240] In preferred embodiments, polypeptides of the invention comprise, or alternatively consist of, one, two, three, four, five or more of the antigenic fragments of the polypeptide of SEQ ID NO:Y, or portions thereof. Polynucleotides encoding these polypeptides are also encompassed by the invention.

[0241] Epitopes and Antibodies

[0242] The present invention encompasses polypeptides comprising, or alternatively consisting of, an epitope of: the polypeptide sequence shown in SEQ ID NO:Y; a polypeptide sequence encoded by SEQ ID NO:X or the complementary strand thereto; the polypeptide sequence encoded by the portion of SEQ ID NO:X as defined in columns 8 and 9 of Table 2; the polypeptide sequence encoded by the portion of SEQ ID NO:B as defined in column 6 of Table 1C or the complement thereto; the polypeptide sequence encoded by the cDNA contained in ATCC Deposit No:Z; or the polypeptide sequence encoded by a polynucleotide that hybridizes to the sequence of SEQ ID NO:X, the complement of the sequence of SEQ ID NO:X, the complement of a portion of SEQ ID NO:X as defined in columns 8 and 9 of Table 2, or the cDNA sequence contained in ATCC Deposit No:Z under stringent hybridization conditions or alternatively, under lower stringency hybridization as defined supra. The present invention further encompasses polynucleotide sequences encoding an epitope of a polypeptide sequence of the invention (such as, for example, the sequence disclosed in SEQ ID NO:X, or a fragment thereof), polynucleotide sequences of the complementary strand of a polynucleotide sequence encoding an epitope of the invention, and polynucleotide sequences which hybridize to the complementary strand under stringent hybridization conditions or alternatively, under lower stringency hybridization conditions defined supra.

[0243] The term “epitopes,” as used herein, refers to portions of a polypeptide having antigenic or immunogenic activity in an animal, preferably a mammal, and most preferably in a human. In a preferred embodiment, the present invention encompasses a polypeptide comprising an epitope, as well as the polynucleotide encoding this polypeptide. An “immunogenic epitope,” as used herein, is defined as a portion of a protein that elicits an antibody response in an animal, as determined by any method known in the art, for example, by the methods for generating antibodies described infra. (See, for example, Geysen et al., Proc. Natl. Acad. Sci. USA 81:3998-4002 (1983)). The term “antigenic epitope,” as used herein, is defined as a portion of a protein to which an antibody can immunospecifically bind its antigen as determined by any method well known in the art, for example, by the immunoassays described herein. Immunospecific binding excludes non-specific binding but does not necessarily exclude cross-reactivity with other antigens. Antigenic epitopes need not necessarily be immunogenic.

[0244] Fragments which function as epitopes may be produced by any conventional means. (See, e.g., Houghten, R. A., Proc. Natl. Acad. Sci. USA 82:5131-5135 (1985) further described in U.S. Pat. No. 4,631,211.)

[0245] In the present invention, antigenic epitopes preferably contain a sequence of at least 4, at least 5, at least 6, at least 7, more preferably at least 8, at least 9, at least 10, at least 11, at least 12, at least 13, at least 14, at least 15, at least 20, at least 25, at least 30, at least 40, at least 50, and, most preferably, between about 15 to about 30 amino acids. Preferred polypeptides comprising immunogenic or antigenic epitopes are at least 10, 15, 20, 25, 30, 35, 40, 45, 50, 55, 60, 65, 70, 75, 80, 85, 90, 95, or 100 amino acid residues in length. Additional non-exclusive preferred antigenic epitopes include the antigenic epitopes disclosed herein, as well as portions thereof. Antigenic epitopes are useful, for example, to raise antibodies, including monoclonal antibodies, that specifically bind the epitope. Preferred antigenic epitopes include the antigenic epitopes disclosed herein, as well as any combination of two, three, four, five or more of these antigenic epitopes. Antigenic epitopes can be used as the target molecules in immunoassays. (See, for instance, Wilson et al., Cell 37:767-778 (1984); Sutcliffe et al., Science 219:660-666 (1983)).

[0246] Non-limiting examples of epitopes of polypeptides that can be used to generate antibodies of the invention include a polypeptide comprising, or alternatively consisting of, at least one, two, three, four, five, six or more of the portion(s) of SEQ ID NO:Y specified in Table 1B. These polypeptide fragments have been determined to bear antigenic epitopes of the proteins of the invention by the analysis of the Jameson-Wolf antigenic index which is included in the DNAStar suite of computer programs. By “comprise” it is intended that a polypeptide contains at least one, two, three, four, five, six or more of the portion(s) of SEQ ID NO:Y shown in Table 1B, but it may contain additional flanking residues on either the amino or carboxyl termini of the recited portion. Such additional flanking sequences are preferably sequences naturally found adjacent to the portion; i.e., contiguous sequence shown in SEQ ID NO:Y. The flanking sequence may, however, be sequences from a heterolgous polypeptide, such as from another protein described herein or from a heterologous polypeptide not described herein. In particular embodiments, epitope portions of a polypeptide of the invention comprise one, two, three, or more of the portions of SEQ ID NO:Y shown in Table 1B.

[0247] Similarly, immunogenic epitopes can be used, for example, to induce antibodies according to methods well known in the art. See, for instance, Sutcliffe et al., supra; Wilson et al., supra; Chow et al., Proc. Natl. Acad. Sci. USA 82:910-914; and Bittle et al., J. Gen. Virol. 66:2347-2354 (1985). Preferred immunogenic epitopes include the immunogenic epitopes disclosed herein, as well as any combination of two, three, four, five or more of these immunogenic epitopes. The polypeptides comprising one or more immunogenic epitopes may be presented for eliciting an antibody response together with a carrier protein, such as an albumin, to an animal system (such as rabbit or mouse), or, if the polypeptide is of sufficient length (at least about 25 amino acids), the polypeptide may be presented without a carrier. However, immunogenic epitopes comprising as few as 8 to 10 amino acids have been shown to be sufficient to raise antibodies capable of binding to, at the very least, linear epitopes in a denatured polypeptide (e.g., in Western blotting).

[0248] Epitope-bearing polypeptides of the present invention may be used to induce antibodies according to methods well known in the art including, but not limited to, in vivo immunization, in vitro immunization, and phage display methods. See, e.g., Sutcliffe et al., supra; Wilson et al., supra, and Bittle et al., J. Gen. Virol., 66:2347-2354 (1985). If in vivo immunization is used, animals may be immunized with free peptide; however, anti-peptide antibody titer may be boosted by coupling the peptide to a macromolecular carrier, such as keyhole limpet hemacyanin (KLH) or tetanus toxoid. For instance, peptides containing cysteine residues may be coupled to a carrier using a linker such as maleimidobenzoyl-N-hydroxysuccinimide ester (MBS), while other peptides may be coupled to carriers using a more general linking agent such as glutaraldehyde. Animals such as rabbits, rats and mice are immunized with either free or carrier-coupled peptides, for instance, by intraperitoneal and/or intradermal injection of emulsions containing about 100 μg of peptide or carrier protein and Freund's adjuvant or any other adjuvant known for stimulating an immune response. Several booster injections may be needed, for instance, at intervals of about two weeks, to provide a useful titer of anti-peptide antibody which can be detected, for example, by ELISA assay using free peptide adsorbed to a solid surface. The titer of anti-peptide antibodies in serum from an immunized animal may be increased by selection of anti-peptide antibodies, for instance, by adsorption to the peptide on a solid support and elution of the selected antibodies according to methods well known in the art.

[0249] As one of skill in the art will appreciate, and as discussed above, the polypeptides of the present invention (e.g., those comprising an immunogenic or antigenic epitope) can be fused to heterologous polypeptide sequences. For example, polypeptides of the present invention (including fragments or variants thereof), may be fused with the constant domain of immunoglobulins (IgA, IgE, IgG, IgM), or portions thereof (CH1, CH2, CH3, or any combination thereof and portions thereof, resulting in chimeric polypeptides. By way of another non-limiting example, polypeptides and/or antibodies of the present invention (including fragments or variants thereof) may be fused with albumin (including but not limited to recombinant human serum albumin or fragments or variants thereof (see, e.g., U.S. Pat. No. 5,876,969, issued Mar. 2, 1999, EP Patent 0 413 622, and U.S. Pat. No. 5,766,883, issued Jun. 16, 1998, herein incorporated by reference in their entirety)). In a preferred embodiment, polypeptides and/or antibodies of the present invention (including fragments or variants thereof) are fused with the mature form of human serum albumin (i.e., amino acids 1-585 of human serum albumin as shown in FIGS. 1 and 2 of EP Patent 0 322 094) which is herein incorporated by reference in its entirety. In another preferred embodiment, polypeptides and/or antibodies of the present invention (including fragments or variants thereof) are fused with polypeptide fragments comprising, or alternatively consisting of, amino acid residues 1-z of human serum albumin, where z is an integer from 369 to 419, as described in U.S. Pat. No. 5,766,883 herein incorporated by reference in its entirety. Polypeptides and/or antibodies of the present invention (including fragments or variants thereof) may be fused to either the N- or C-terminal end of the heterologous protein (e.g., immunoglobulin Fc polypeptide or human serum albumin polypeptide). Polynucleotides encoding fusion proteins of the invention are also encompassed by the invention.

[0250] Such fusion proteins as those described above may facilitate purification and may increase half-life in vivo. This has been shown for chimeric proteins consisting of the first two domains of the human CD4-polypeptide and various domains of the constant regions of the heavy or light chains of mammalian immunoglobulins. See, e.g., EP 394,827; Traunecker et al., Nature, 331:84-86 (1988). Enhanced delivery of an antigen across the epithelial barrier to the immune system has been demonstrated for antigens (e.g., insulin) conjugated to an FcRn binding partner such as IgG or Fc fragments (see, e.g., PCT Publications WO 96/22024 and WO 99/04813). IgG fusion proteins that have a disulfide-linked dimeric structure due to the IgG portion desulfide bonds have also been found to be more efficient in binding and neutralizing other molecules than monomeric polypeptides or fragments thereof alone. See, e.g., Fountoulakis et al., J. Biochem., 270:3958-3964 (1995). Nucleic acids encoding the above epitopes can also be recombined with a gene of interest as an epitope tag (e.g., the hemagglutinin (HA) tag or flag tag) to aid in detection and purification of the expressed polypeptide. For example, a system described by Janknecht et al. allows for the ready purification of non-denatured fusion proteins expressed in human cell lines (Janknecht et al., 1991, Proc. Natl. Acad. Sci. USA 88:8972-897). In this system, the gene of interest is subcloned into a vaccinia recombination plasmid such that the open reading frame of the gene is translationally fused to an amino-terminal tag consisting of six histidine residues. The tag serves as a matrix binding domain for the fusion protein. Extracts from cells infected with the recombinant vaccinia virus are loaded onto Ni2+ nitriloacetic acid-agarose column and histidine-tagged proteins can be selectively eluted with imidazole-containing buffers.

[0251] Fusion Proteins

[0252] Any polypeptide of the present invention can be used to generate fusion proteins. For example, the polypeptide of the present invention, when fused to a second protein, can be used as an antigenic tag. Antibodies raised against the polypeptide of the present invention can be used to indirectly detect the second protein by binding to the polypeptide. Moreover, because secreted proteins target cellular locations based on trafficking signals, polypeptides of the present invention which are shown to be secreted can be used as targeting molecules once fused to other proteins.

[0253] Examples of domains that can be fused to polypeptides of the present invention include not only heterologous signal sequences, but also other heterologous functional regions. The fusion does not necessarily need to be direct, but may occur through linker sequences.

[0254] In certain preferred embodiments, proteins of the invention are fusion proteins comprising an amino acid sequence that is an N and/or C-terminal deletion of a polypeptide of the invention. In preferred embodiments, the invention is directed to a fusion protein comprising an amino acid sequence that is at least 90%, 95%, 96%, 97%, 98% or 99% identical to a polypeptide sequence of the invention. Polynucleotides encoding these proteins are also encompassed by the invention.

[0255] Moreover, fusion proteins may also be engineered to improve characteristics of the polypeptide of the present invention. For instance, a region of additional amino acids, particularly charged amino acids, may be added to the N-terminus of the polypeptide to improve stability and persistence during purification from the host cell or subsequent handling and storage. Also, peptide moieties may be added to the polypeptide to facilitate purification. Such regions may be removed prior to final preparation of the polypeptide. The addition of peptide moieties to facilitate handling of polypeptides are familiar and routine techniques in the art.

[0256] As one of skill in the art will appreciate that, as discussed above, polypeptides of the present invention, and epitope-bearing fragments thereof, can be combined with heterologous polypeptide sequences. For example, the polypeptides of the present invention may be fused with heterologous polypeptide sequences, for example, the polypeptides of the present invention may be fused with the constant domain of immunoglobulins (IgA, IgE, IgG, IgM) or portions thereof (CH1, CH2, CH3, and any combination thereof, including both entire domains and portions thereof), or albumin (including, but not limited to, native or recombinant human albumin or fragments or variants thereof (see, e.g., U.S. Pat. No. 5,876,969, issued Mar. 2, 1999, EP Patent 0 413 622, and U.S. Pat. No. 5,766,883, issued Jun. 16, 1998, herein incorporated by reference in their entirety)), resulting in chimeric polypeptides. For example, EP-A-O 464 533 (Canadian counterpart 2045869) discloses fusion proteins comprising various portions of constant region of immunoglobulin molecules together with another human protein or part thereof. In many cases, the Fc part in a fusion protein is beneficial in therapy and diagnosis, and thus can result in, for example, improved pharmacokinetic properties (EP-A 0232 262). Alternatively, deleting the Fc part after the fusion protein has been expressed, detected, and purified, would be desired. For example, the Fc portion may hinder therapy and diagnosis if the fusion protein is used as an antigen for immunizations. In drug discovery, for example, human proteins, such as hIL-5, have been fused with Fc portions for the purpose of high-throughput screening assays to identify antagonists of hIL-5. See, D. Bennett et al., J. Molecular Recognition 8:52-58 (1995); K. Johanson et al., J. Biol. Chem. 270:9459-9471 (1995).

[0257] Moreover, the polypeptides of the present invention can be fused to marker sequences, such as a polypeptide which facilitates purification of the fused polypeptide. In preferred embodiments, the marker amino acid sequence is a hexa-histidine peptide, such as the tag provided in a pQE vector (QIAGEN, Inc., 9259 Eton Avenue, Chatsworth, Calif., 91311), among others, many of which are commercially available. As described in Gentz et al., Proc. Natl. Acad. Sci. USA 86:821-824 (1989), for instance, hexa-histidine provides for convenient purification of the fusion protein. Another peptide tag useful for purification, the “HA” tag, corresponds to an epitope derived from the influenza hemagglutinin protein (Wilson et al., Cell 37:767 (1984)).

[0258] Additional fusion proteins of the invention may be generated through the techniques of gene-shuffling, motif-shuffling, exon-shuffling, and/or codon-shuffling (collectively referred to as “DNA shuffling”). DNA shuffling may be employed to modulate the activities of polypeptides of the invention, such methods can be used to generate polypeptides with altered activity, as well as agonists and antagonists of the polypeptides. See, generally, U.S. Pat. Nos. 5,605,793; 5,811,238; 5,830,721; 5,834,252; and 5,837,458, and Patten et al., Curr. Opinion Biotechnol. 8:724-33 (1997); Harayama, Trends Biotechnol. 16(2):76-82 (1998); Hansson, et al., J. Mol. Biol. 287:265-76 (1999); and Lorenzo and Blasco, Biotechniques 24(2):308-13 (1998) (each of these patents and publications are hereby incorporated by reference in its entirety). In one embodiment, alteration of polynucleotides corresponding to SEQ ID NO:X and the polypeptides encoded by these polynucleotides may be achieved by DNA shuffling. DNA shuffling involves the assembly of two or more DNA segments by homologous or site-specific recombination to generate variation in the polynucleotide sequence. In another embodiment, polynucleotides of the invention, or the encoded polypeptides, may be altered by being subjected to random mutagenesis by error-prone PCR, random nucleotide insertion or other methods prior to recombination. In another embodiment, one or more components, motifs, sections, parts, domains, fragments, etc., of a polynucleotide encoding a polypeptide of the invention may be recombined with one or more components, motifs, sections, parts, domains, fragments, etc. of one or more heterologous molecules.

[0259] Thus, any of these above fusions can be engineered using the polynucleotides or the polypeptides of the present invention.

[0260] Recombinant and Synthetic Production of Polypeptides of the Invention

[0261] The present invention also relates to vectors containing the polynucleotide of the present invention, host cells, and the production of polypeptides by synthetic and recombinant techniques. The vector may be, for example, a phage, plasmid, viral, or retroviral vector. Retroviral vectors may be replication competent or replication defective. In the latter case, viral propagation generally will occur only in complementing host cells.

[0262] The polynucleotides of the invention may be joined to a vector containing a selectable marker for propagation in a host. Generally, a plasmid vector is introduced in a precipitate, such as a calcium phosphate precipitate, or in a complex with a charged lipid. If the vector is a virus, it may be packaged in vitro using an appropriate packaging cell line and then transduced into host cells.

[0263] The polynucleotide insert should be operatively linked to an appropriate promoter, such as the phage lambda PL promoter, the E. coli lac, trp, phoA and tac promoters, the SV40 early and late promoters and promoters of retroviral LTRs, to name a few. Other suitable promoters will be known to the skilled artisan. The expression constructs will further contain sites for transcription initiation, termination, and, in the transcribed region, a ribosome binding site for translation. The coding portion of the transcripts expressed by the constructs will preferably include a translation initiating codon at the beginning and a termination codon (UAA, UGA or UAG) appropriately positioned at the end of the polypeptide to be translated.

[0264] As indicated, the expression vectors will preferably include at least one selectable marker. Such markers include dihydrofolate reductase, G418, glutamine synthase, or neomycin resistance for eukaryotic cell culture, and tetracycline, kanamycin or ampicillin resistance genes for culturing in E. coli and other bacteria. Representative examples of appropriate hosts include, but are not limited to, bacterial cells, such as E. coli, Streptomyces and Salmonella typhimurium cells; fungal cells, such as yeast cells (e.g., Saccharomyces cerevisiae or Pichia pastoris (ATCC Accession No. 201178)); insect cells such as Drosophila S2 and Spodoptera Sf9 cells; animal cells such as CHO, COS, 293, and Bowes melanoma cells; and plant cells. Appropriate culture mediums and conditions for the above-described host cells are known in the art.

[0265] Among vectors preferred for use in bacteria include pQE70, pQE60 and pQE-9, available from QIAGEN, Inc.; pBluescript vectors, Phagescript vectors, pNH8A, pNH16a, pNH18A, pNH46A, available from Stratagene Cloning Systems, Inc.; and ptrc99a, pKK223-3, pKK233-3, pDR540, pRIT5 available from Pharmacia Biotech, Inc. Among preferred eukaryotic vectors are pWLNEO, pSV2CAT, pOG44, pXT1 and pSG available from Stratagene; and pSVK3, pBPV, pMSG and pSVL available from Pharmacia. Preferred expression vectors for use in yeast systems include, but are not limited to pYES2, pYD1, pTEF1/Zeo, pYES2/GS, pPICZ, pGAPZ, pGAPZalph, pPIC9, pPIC3.5, pHIL-D2, pHIL-S1, pPIC3.5K, pPIC9K, and PA0815 (all available from Invitrogen, Carlbad, Calif.). Other suitable vectors will be readily apparent to the skilled artisan.

[0266] Vectors which use glutamine synthase (GS) or DHFR as the selectable markers can be amplified in the presence of the drugs methionine sulphoximine or methotrexate, respectively. An advantage of glutamine synthase based vectors are the availabilty of cell lines (e.g., the murine myeloma cell line, NS0) which are glutamine synthase negative. Glutamine synthase expression systems can also function in glutamine synthase expressing cells (e.g., Chinese Hamster Ovary (CHO) cells) by providing additional inhibitor to prevent the functioning of the endogenous gene. A glutamine synthase expression system and components thereof are detailed in PCT publications: WO87/04462; WO86/05807; WO89/01036; WO89/10404; and WO91/06657, which are hereby incorporated in their entireties by reference herein. Additionally, glutamine synthase expression vectors can be obtained from Lonza Biologics, Inc. (Portsmouth, N.H.). Expression and production of monoclonal antibodies using a GS expression system in murine myeloma cells is described in Bebbington et al., Bio/technology 10:169 (1992) and in Biblia and Robinson Biotechnol. Prog. 11:1 (1995) which are herein incorporated by reference.

[0267] The present invention also relates to host cells containing the above-described vector constructs described herein, and additionally encompasses host cells containing nucleotide sequences of the invention that are operably associated with one or more heterologous control regions (e.g., promoter and/or enhancer) using techniques known of in the art. The host cell can be a higher eukaryotic cell, such as a mammalian cell (e.g., a human derived cell), or a lower eukaryotic cell, such as a yeast cell, or the host cell can be a prokaryotic cell, such as a bacterial cell. A host strain may be chosen which modulates the expression of the inserted gene sequences, or modifies and processes the gene product in the specific fashion desired. Expression from certain promoters can be elevated in the presence of certain inducers; thus expression of the genetically engineered polypeptide may be controlled. Furthermore, different host cells have characteristics and specific mechanisms for the translational and post-translational processing and modification (e.g., phosphorylation, cleavage) of proteins. Appropriate cell lines can be chosen to ensure the desired modifications and processing of the foreign protein expressed.

[0268] Introduction of the nucleic acids and nucleic acid constructs of the invention into the host cell can be effected by calcium phosphate transfection, DEAE-dextran mediated transfection, cationic lipid-mediated transfection, electroporation, transduction, infection, or other methods. Such methods are described in many standard laboratory manuals, such as Davis et al., Basic Methods In Molecular Biology (1986). It is specifically contemplated that the polypeptides of the present invention may in fact be expressed by a host cell lacking a recombinant vector.

[0269] In addition to encompassing host cells containing the vector constructs discussed herein, the invention also encompasses primary, secondary, and immortalized host cells of vertebrate origin, particularly mammalian origin, that have been engineered to delete or replace endogenous genetic material (e.g., the coding sequence), and/or to include genetic material (e.g., heterologous polynucleotide sequences) that is operably associated with polynucleotides of the invention, and which activates, alters, and/or amplifies endogenous polynucleotides. For example, techniques known in the art may be used to operably associate heterologous control regions (e.g., promoter and/or enhancer) and endogenous polynucleotide sequences via homologous recombination (see, e.g., U.S. Pat. No. 5,641,670, issued Jun. 24, 1997; International Publication Number WO 96/29411; International Publication Number WO 94/12650; Koller et al., Proc. Natl. Acad. Sci. USA 86:8932-8935 (1989); and Zijlstra et al., Nature 342:435-438 (1989), the disclosures of each of which are incorporated by reference in their entireties).

[0270] Polypeptides of the invention can be recovered and purified from recombinant cell cultures by well-known methods including ammonium sulfate or ethanol precipitation, acid extraction, anion or cation exchange chromatography, phosphocellulose chromatography, hydrophobic interaction chromatography, affinity chromatography, hydroxylapatite chromatography and lectin chromatography. Most preferably, high performance liquid chromatography (“HPLC”) is employed for purification.

[0271] Polypeptides of the present invention can also be recovered from: products purified from natural sources, including bodily fluids, tissues and cells, whether directly isolated or cultured; products of chemical synthetic procedures; and products produced by recombinant techniques from a prokaryotic or eukaryotic host, including, for example, bacterial, yeast, higher plant, insect, and mammalian cells. Depending upon the host employed in a recombinant production procedure, the polypeptides of the present invention may be glycosylated or may be non-glycosylated. In addition, polypeptides of the invention may also include an initial modified methionine residue, in some cases as a result of host-mediated processes. Thus, it is well known in the art that the N-terminal methionine encoded by the translation initiation codon generally is removed with high efficiency from any protein after translation in all eukaryotic cells. While the N-terminal methionine on most proteins also is efficiently removed in most prokaryotes, for some proteins, this prokaryotic removal process is inefficient, depending on the nature of the amino acid to which the N-terminal methionine is covalently linked.

[0272] In one embodiment, the yeast Pichia pastoris is used to express polypeptides of the invention in a eukaryotic system. Pichia pastoris is a methylotrophic yeast which can metabolize methanol as its sole carbon source. A main step in the methanol metabolization pathway is the oxidation of methanol to formaldehyde using O₂. This reaction is catalyzed by the enzyme alcohol oxidase. In order to metabolize methanol as its sole carbon source, Pichia pastoris must generate high levels of alcohol oxidase due, in part, to the relatively low affinity of alcohol oxidase for O₂. Consequently, in a growth medium depending on methanol as a main carbon source, the promoter region of one of the two alcohol oxidase genes (AOX1) is highly active. In the presence of methanol, alcohol oxidase produced from the AOX1 gene comprises up to approximately 30% of the total soluble protein in Pichia pastoris. See Ellis, S. B., et al., Mol. Cell. Biol. 5:1111-21 (1985); Koutz, P. J, et al., Yeast 5:167-77 (1989); Tschopp, J. F., et al., Nucl. Acids Res. 15:3859-76 (1987). Thus, a heterologous coding sequence, such as, for example, a polynucleotide of the present invention, under the transcriptional regulation of all or part of the AOX1 regulatory sequence is expressed at exceptionally high levels in Pichia yeast grown in the presence of methanol.

[0273] In one example, the plasmid vector pPIC9K is used to express DNA encoding a polypeptide of the invention, as set forth herein, in a Pichea yeast system essentially as described in “Pichia Protocols: Methods in Molecular Biology,” D. R. Higgins and J. Cregg, eds. The Humana Press, Totowa, N.J., 1998. This expression vector allows expression and secretion of a polypeptide of the invention by virtue of the strong AOX1 promoter linked to the Pichia pastoris alkaline phosphatase (PHO) secretory signal peptide (i.e., leader) located upstream of a multiple cloning site.

[0274] Many other yeast vectors could be used in place of pPIC9K, such as, pYES2, pYD1, pTEF1/Zeo, pYES2/GS, pPICZ, pGAPZ, pGAPZalpha, pPIC9, pPIC3.5, pHIL-D2, pHIL-S1, pPIC3.5K, and PA0815, as one skilled in the art would readily appreciate, as long as the proposed expression construct provides appropriately located signals for transcription, translation, secretion (if desired), and the like, including an in-frame AUG as required.

[0275] In another embodiment, high-level expression of a heterologous coding sequence, such as, for example, a polynucleotide of the present invention, may be achieved by cloning the heterologous polynucleotide of the invention into an expression vector such as, for example, pGAPZ or pGAPZalpha, and growing the yeast culture in the absence of methanol.

[0276] In addition to encompassing host cells containing the vector constructs discussed herein, the invention also encompasses primary, secondary, and immortalized host cells of vertebrate origin, particularly mammalian origin, that have been engineered to delete or replace endogenous genetic material (e.g., coding sequence), and/or to include genetic material (e.g., heterologous polynucleotide sequences) that is operably associated with polynucleotides of the invention, and which activates, alters, and/or amplifies endogenous polynucleotides. For example, techniques known in the art may be used to operably associate heterologous control regions (e.g., promoter and/or enhancer) and endogenous polynucleotide sequences via homologous recombination (see, e.g., U.S. Pat. No. 5,641,670, issued Jun. 24, 1997; International Publication No. WO 96/29411, published Sep. 26, 1996; International Publication No. WO 94/12650, published Aug. 4, 1994; Koller et al., Proc. Natl. Acad. Sci. USA 86:8932-8935 (1989); and Zijlstra et al., Nature 342:435-438 (1989), the disclosures of each of which are incorporated by reference in their entireties).

[0277] In addition, polypeptides of the invention can be chemically synthesized using techniques known in the art (e.g., see Creighton, 1983, Proteins: Structures and Molecular Principles, W.H. Freeman & Co., N.Y., and Hunkapiller et al., Nature, 310:105-111 (1984)). For example, a polypeptide corresponding to a fragment of a polypeptide can be synthesized by use of a peptide synthesizer. Furthermore, if desired, nonclassical amino acids or chemical amino acid analogs can be introduced as a substitution or addition into the polypeptide sequence. Non-classical amino acids include, but are not limited to, to the D-isomers of the common amino acids, 2,4-diaminobutyric acid, a-amino isobutyric acid, 4-aminobutyric acid, Abu, 2-amino butyric acid, g-Abu, e-Ahx, 6-amino hexanoic acid, Aib, 2-amino isobutyric acid, 3-amino propionic acid, ornithine, norleucine, norvaline, hydroxyproline, sarcosine, citrulline, homocitrulline, cysteic acid, t-butylglycine, t-butylalanine, phenylglycine, cyclohexylalanine, b-alanine, fluoro-amino acids, designer amino acids such as b-methyl amino acids, Ca-methyl amino acids, Na-methyl amino acids, and amino acid analogs in general. Furthermore, the amino acid can be D (dextrorotary) or L (levorotary).

[0278] The invention encompasses polypeptides of the present invention which are differentially modified during or after translation, e.g., by glycosylation, acetylation, phosphorylation, amidation, derivatization by known protecting/blocking groups, proteolytic cleavage, linkage to an antibody molecule or other cellular ligand, etc. Any of numerous chemical modifications may be carried out by known techniques, including but not limited, to specific chemical cleavage by cyanogen bromide, trypsin, chymotrypsin, papain, V8 protease, NaBH₄; acetylation, formylation, oxidation, reduction; metabolic synthesis in the presence of tunicamycin; etc.

[0279] Additional post-translational modifications encompassed by the invention include, for example, e.g., N-linked or O-linked carbohydrate chains, processing of N-terminal or C-terminal ends), attachment of chemical moieties to the amino acid backbone, chemical modifications of N-linked or O-linked carbohydrate chains, and addition or deletion of an N-terminal methionine residue as a result of procaryotic host cell expression. The polypeptides may also be modified with a detectable label, such as an enzymatic, fluorescent, isotopic or affinity label to allow for detection and isolation of the protein.

[0280] Examples of suitable enzymes include horseradish peroxidase, alkaline phosphatase, beta-galactosidase, or acetylcholinesterase; examples of suitable prosthetic group complexes include streptavidin/biotin and avidin/biotin; examples of suitable fluorescent materials include umbelliferone, fluorescein, fluorescein isothiocyanate, rhodamine, dichlorotriazinylamine fluorescein, dansyl chloride or phycoerythrin; an example of a luminescent material includes luminol; examples of bioluminescent materials include luciferase, luciferin, and aequorin; and examples of suitable radioactive material include iodine (¹²¹I, ¹²³I, ¹²⁵I, ¹³¹I), carbon (¹⁴C), sulfur (³⁵S), tritium (³H), indium (¹¹¹In, ¹¹²In, ^{113m}In, ^{115m}In), technetium (⁹⁹Tc, ^{99m}Tc), thallium (²⁰¹Ti), gallium (⁶⁸Ga, ⁶⁷Ga), palladium (¹⁰³Pd), molybdenum (⁹⁹Mo), xenon (¹³³Xe), fluorine (¹⁸F), ¹⁵³Sm, ¹⁷⁷Lu, ¹⁵⁹Gd, ¹⁴⁹Pm, ¹⁴⁰La, ¹⁷⁵Yb, ¹⁶⁶Ho, ⁹⁰Y, ⁴⁷Sc, ¹⁸⁶Re, ¹⁸⁸Re, ¹⁴²Pr, ¹⁰⁵Rh, and ⁹⁷Ru.

[0281] In specific embodiments, a polypeptide of the present invention or fragment or variant thereof is attached to macrocyclic chelators that associate with radiometal ions, including but not limited to, ¹⁷⁷Lu, ⁹⁰Y, ¹⁶⁶Ho, and ¹⁵³Sm, to polypeptides. In a preferred embodiment, the radiometal ion associated with the macrocyclic chelators is ¹¹¹In. In another preferred embodiment, the radiometal ion associated with the macrocyclic chelator is ⁹⁰Y. In specific embodiments, the macrocyclic chelator is 1,4,7,10-tetraazacyclododecane-N,N′,N″,N′″-tetraacetic acid (DOTA). In other specific embodiments, DOTA is attached to an antibody of the invention or fragment thereof via a linker molecule. Examples of linker molecules useful for conjugating DOTA to a polypeptide are commonly known in the art—see, for example, DeNardo et al., Clin Cancer Res. 4(10):2483-90 (1998); Peterson et al., Bioconjug. Chem. 10(4):553-7 (1999); and Zimmerman et al, Nucl. Med. Biol. 26(8):943-50 (1999); which are hereby incorporated by reference in their entirety.

[0282] As mentioned, the proteins of the invention may be modified by either natural processes, such as posttranslational processing, or by chemical modification techniques which are well known in the art. It will be appreciated that the same type of modification may be present in the same or varying degrees at several sites in a given polypeptide. Polypeptides of the invention may be branched, for example, as a result of ubiquitination, and they may be cyclic, with or without branching. Cyclic, branched, and branched cyclic polypeptides may result from posttranslation natural processes or may be made by synthetic methods. Modifications include acetylation, acylation, ADP-ribosylation, amidation, covalent attachment of flavin, covalent attachment of a heme moiety, covalent attachment of a nucleotide or nucleotide derivative, covalent attachment of a lipid or lipid derivative, covalent attachment of phosphotidylinositol, cross-linking, cyclization, disulfide bond formation, demethylation, formation of covalent cross-links, formation of cysteine, formation of pyroglutamate, formylation, gamma-carboxylation, glycosylation, GPI anchor formation, hydroxylation, iodination, methylation, myristoylation, oxidation, pegylation, proteolytic processing, phosphorylation, prenylation, racemization, selenoylation, sulfation, transfer-RNA mediated addition of amino acids to proteins such as arginylation, and ubiquitination. (See, for instance, PROTEINS—STRUCTURE AND MOLECULAR PROPERTIES, 2nd Ed., T.E. Creighton, W.H. Freeman and Company, New York (1993); POSTTRANSLATIONAL COVALENT MODIFICATION OF PROTEINS, B. C. Johnson, Ed., Academic Press, New York, pgs. 1-12 (1983); Seifter et al., Meth. Enzymol. 182:626-646 (1990); Rattan et al., Ann. N.Y. Acad. Sci. 663:48-62 (1992)).

[0283] Also provided by the invention are chemically modified derivatives of the polypeptides of the invention which may provide additional advantages such as increased solubility, stability and circulating time of the polypeptide, or decreased immunogenicity (see U.S. Pat. No. 4,179,337). The chemical moieties for derivitization may be selected from water soluble polymers such as polyethylene glycol, ethylene glycol/propylene glycol copolymers, carboxymethylcellulose, dextran, polyvinyl alcohol and the like. The polypeptides may be modified at random positions within the molecule, or at predetermined positions within the molecule and may include one, two, three or more attached chemical moieties.

[0284] The polymer may be of any molecular weight, and may be branched or unbranched. For polyethylene glycol, the preferred molecular weight is between about 1 kDa and about 100 kDa (the term “about” indicating that in preparations of polyethylene glycol, some molecules will weigh more, some less, than the stated molecular weight) for ease in handling and manufacturing. Other sizes may be used, depending on the desired therapeutic profile (e.g., the duration of sustained release desired, the effects, if any on biological activity, the ease in handling, the degree or lack of antigenicity and other known effects of the polyethylene glycol to a therapeutic protein or analog). For example, the polyethylene glycol may have an average molecular weight of about 200, 500, 1000, 1500, 2000, 2500, 3000, 3500, 4000, 4500, 5000, 5500, 6000, 6500, 7000, 7500, 8000, 8500, 9000, 9500, 10,000, 10,500, 11,000, 11,500, 12,000, 12,500, 13,000, 13,500, 14,000, 14,500, 15,000, 15,500, 16,000, 16,500, 17,000, 17,500, 18,000, 18,500, 19,000, 19,500, 20,000, 25,000, 30,000, 35,000, 40,000, 45,000, 50,000, 55,000, 60,000, 65,000, 70,000, 75,000, 80,000, 85,000, 90,000, 95,000, or 100,000 kDa.

[0285] As noted above, the polyethylene glycol may have a branched structure. Branched polyethylene glycols are described, for example, in U.S. Pat. No. 5,643,575; Morpurgo et al., Appl. Biochem. Biotechnol. 56:59-72 (1996); Vorobjev et al., Nucleosides Nucleotides 18:2745-2750 (1999); and Caliceti et al., Bioconjug. Chem. 10:638-646 (1999), the disclosures of each of which are incorporated herein by reference.

[0286] The polyethylene glycol molecules (or other chemical moieties) should be attached to the protein with consideration of effects on functional or antigenic domains of the protein. There are a number of attachment methods available to those skilled in the art, such as, for example, the method disclosed in EP 0 401 384 (coupling PEG to G-CSF), herein incorporated by reference; see also Malik et al., Exp. Hematol. 20:1028-1035 (1992), reporting pegylation of GM-CSF using tresyl chloride. For example, polyethylene glycol may be covalently bound through amino acid residues via a reactive group, such as a free amino or carboxyl group. Reactive groups are those to which an activated polyethylene glycol molecule may be bound. The amino acid residues having a free amino group may include lysine residues and the N-terminal amino acid residues; those having a free carboxyl group may include aspartic acid residues glutamic acid residues and the C-terminal amino acid residue. Sulfhydryl groups may also be used as a reactive group for attaching the polyethylene glycol molecules. Preferred for therapeutic purposes is attachment at an amino group, such as attachment at the N-terminus or lysine group.

[0287] As suggested above, polyethylene glycol may be attached to proteins via linkage to any of a number of amino acid residues. For example, polyethylene glycol can be linked to proteins via covalent bonds to lysine, histidine, aspartic acid, glutamic acid, or cysteine residues. One or more reaction chemistries may be employed to attach polyethylene glycol to specific amino acid residues (e.g., lysine, histidine, aspartic acid, glutamic acid, or cysteine) of the protein or to more than one type of amino acid residue (e.g., lysine, histidine, aspartic acid, glutamic acid, cysteine and combinations thereof) of the protein.

[0288] One may specifically desire proteins chemically modified at the N-terminus. Using polyethylene glycol as an illustration of the present composition, one may select from a variety of polyethylene glycol molecules (by molecular weight, branching, etc.), the proportion of polyethylene glycol molecules to protein (polypeptide) molecules in the reaction mix, the type of pegylation reaction to be performed, and the method of obtaining the selected N-terminally pegylated protein. The method of obtaining the N-terminally pegylated preparation (i.e., separating this moiety from other monopegylated moieties if necessary) may be by purification of the N-terminally pegylated material from a population of pegylated protein molecules. Selective proteins chemically modified at the N-terminus modification may be accomplished by reductive alkylation which exploits differential reactivity of different types of primary amino groups (lysine versus the N-terminal) available for derivatization in a particular protein. Under the appropriate reaction conditions, substantially selective derivatization of the protein at the N-terminus with a carbonyl group containing polymer is achieved.

[0289] As indicated above, pegylation of the proteins of the invention may be accomplished by any number of means. For example, polyethylene glycol may be attached to the protein either directly or by an intervening linker. Linkerless systems for attaching polyethylene glycol to proteins are described in Delgado et al., Crit. Rev. Thera. Drug Carrier Sys. 9:249-304 (1992); Francis et al., Intern. J. of Hematol. 68:1-18 (1998); U.S. Pat. No. 4,002,531; U.S. Pat. No. 5,349,052; WO 95/06058; and WO 98/32466, the disclosures of each of which are incorporated herein by reference.

[0290] One system for attaching polyethylene glycol directly to amino acid residues of proteins without an intervening linker employs tresylated MPEG, which is produced by the modification of monmethoxy polyethylene glycol (MPEG) using tresylchloride (ClSO₂CH₂CF₃). Upon reaction of protein with tresylated MPEG, polyethylene glycol is directly attached to amine groups of the protein. Thus, the invention includes protein-polyethylene glycol conjugates produced by reacting proteins of the invention with a polyethylene glycol molecule having a 2,2,2-trifluoreothane sulphonyl group.

[0291] Polyethylene glycol can also be attached to proteins using a number of different intervening linkers. For example, U.S. Pat. No. 5,612,460, the entire disclosure of which is incorporated herein by reference, discloses urethane linkers for connecting polyethylene glycol to proteins. Protein-polyethylene glycol conjugates wherein the polyethylene glycol is attached to the protein by a linker can also be produced by reaction of proteins with compounds such as MPEG-succinimidylsuccinate, MPEG activated with 1,1′-carbonyldiimidazole, MPEG-2,4,5-trichloropenylcarbonate, MPEG-p-nitrophenolcarbonate, and various MPEG-succinate derivatives. A number of additional polyethylene glycol derivatives and reaction chemistries for attaching polyethylene glycol to proteins are described in International Publication No. WO 98/32466, the entire disclosure of which is incorporated herein by reference. Pegylated protein products produced using the reaction chemistries set out herein are included within the scope of the invention.

[0292] The number of polyethylene glycol moieties attached to each protein of the invention (i.e., the degree of substitution) may also vary. For example, the pegylated proteins of the invention may be linked, on average, to 1, 2, 3, 4, 5, 6, 7, 8, 9, 10, 12, 15, 17, 20, or more polyethylene glycol molecules. Similarly, the average degree of substitution within ranges such as 1-3, 2-4, 3-5, 4-6, 5-7, 6-8, 7-9, 8-10, 9-11, 10-12, 11-13, 12-14, 13-15, 14-16, 15-17, 16-18, 17-19, or 18-20 polyethylene glycol moieties per protein molecule. Methods for determining the degree of substitution are discussed, for example, in Delgado et al., Crit. Rev. Thera. Drug Carrier Sys. 9:249-304 (1992).

[0293] The polypeptides of the invention can be recovered and purified from chemical synthesis and recombinant cell cultures by standard methods which include, but are not limited to, ammonium sulfate or ethanol precipitation, acid extraction, anion or cation exchange chromatography, phosphocellulose chromatography, hydrophobic interaction chromatography, affinity chromatography, hydroxylapatite chromatography and lectin chromatography. Most preferably, high performance liquid chromatography (“HPLC”) is employed for purification. Well known techniques for refolding protein may be employed to regenerate active conformation when the polypeptide is denatured during isolation and/or purification.

[0294] The polypeptides of the invention may be in monomers or multimers (i.e., dimers, trimers, tetramers and higher multimers). Accordingly, the present invention relates to monomers and multimers of the polypeptides of the invention, their preparation, and compositions (preferably, Therapeutics) containing them. In specific embodiments, the polypeptides of the invention are monomers, dimers, trimers or tetramers. In additional embodiments, the multimers of the invention are at least dimers, at least trimers, or at least tetramers.

[0295] Multimers encompassed by the invention may be homomers or heteromers. As used herein, the term homomer refers to a multimer containing only polypeptides corresponding to a protein of the invention (e.g., the amino acid sequence of SEQ ID NO:Y, an amino acid sequence encoded by SEQ ID NO:X or the complement of SEQ ID NO:X, the amino acid sequence encoded by the portion of SEQ ID NO:X as defined in columns 8 and 9 of Table 2, and/or an amino acid sequence encoded by cDNA contained in ATCC Deposit No:Z (including fragments, variants, splice variants, and fusion proteins, corresponding to these as described herein)). These homomers may contain polypeptides having identical or different amino acid sequences. In a specific embodiment, a homomer of the invention is a multimer containing only polypeptides having an identical amino acid sequence. In another specific embodiment, a homomer of the invention is a multimer containing polypeptides having different amino acid sequences. In specific embodiments, the multimer of the invention is a homodimer (e.g., containing two polypeptides having identical or different amino acid sequences) or a homotrimer (e.g., containing three polypeptides having identical and/or different amino acid sequences). In additional embodiments, the homomeric multimer of the invention is at least a homodimer, at least a homotrimer, or at least a homotetramer.

[0296] As used herein, the term heteromer refers to a multimer containing one or more heterologous polypeptides (i.e., polypeptides of different proteins) in addition to the polypeptides of the invention. In a specific embodiment, the multimer of the invention is a heterodimer, a heterotrimer, or a heterotetramer. In additional embodiments, the heteromeric multimer of the invention is at least a heterodimer, at least a heterotrimer, or at least a heterotetramer.

[0297] Multimers of the invention may be the result of hydrophobic, hydrophilic, ionic and/or covalent associations and/or may be indirectly linked by, for example, liposome formation. Thus, in one embodiment, multimers of the invention, such as, for example, homodimers or homotrimers, are formed when polypeptides of the invention contact one another in solution. In another embodiment, heteromultimers of the invention, such as, for example, heterotrimers or heterotetramers, are formed when polypeptides of the invention contact antibodies to the polypeptides of the invention (including antibodies to the heterologous polypeptide sequence in a fusion protein of the invention) in solution. In other embodiments, multimers of the invention are formed by covalent associations with and/or between the polypeptides of the invention. Such covalent associations may involve one or more amino acid residues contained in the polypeptide sequence (e.g., that recited in SEQ ID NO:Y, encoded by the portion of SEQ ID NO:X as defined in columns 8 and 9 of Table 2, and/or encoded by the cDNA contained in ATCC Deposit No:Z). In one instance, the covalent associations are cross-linking between cysteine residues located within the polypeptide sequences which interact in the native (i.e., naturally occurring) polypeptide. In another instance, the covalent associations are the consequence of chemical or recombinant manipulation. Alternatively, such covalent associations may involve one or more amino acid residues contained in the heterologous polypeptide sequence in a fusion protein. In one example, covalent associations are between the heterologous sequence contained in a fusion protein of the invention (see, e.g., U.S. Pat. No. 5,478,925). In a specific example, the covalent associations are between the heterologous sequence contained in a Fc fusion protein of the invention (as described herein). In another specific example, covalent associations of fusion proteins of the invention are between heterologous polypeptide sequence from another protein that is capable of forming covalently associated multimers, such as for example, osteoprotegerin (see, e.g., International Publication NO: WO 98/49305, the contents of which are herein incorporated by reference in its entirety). In another embodiment, two or more polypeptides of the invention are joined through peptide linkers. Examples include those peptide linkers described in U.S. Pat. No. 5,073,627 (hereby incorporated by reference). Proteins comprising multiple polypeptides of the invention separated by peptide linkers may be produced using conventional recombinant DNA technology.

[0298] Another method for preparing multimer polypeptides of the invention involves use of polypeptides of the invention fused to a leucine zipper or isoleucine zipper polypeptide sequence. Leucine zipper and isoleucine zipper domains are polypeptides that promote multimerization of the proteins in which they are found. Leucine zippers were originally identified in several DNA-binding proteins (Landschulz et al., Science 240:1759, (1988)), and have since been found in a variety of different proteins. Among the known leucine zippers are naturally occurring peptides and derivatives thereof that dimerize or trimerize. Examples of leucine zipper domains suitable for producing soluble multimeric proteins of the invention are those described in PCT application WO 94/10308, hereby incorporated by reference. Recombinant fusion proteins comprising a polypeptide of the invention fused to a polypeptide sequence that dimerizes or trimerizes in solution are expressed in suitable host cells, and the resulting soluble multimeric fusion protein is recovered from the culture supernatant using techniques known in the art.

[0299] Trimeric polypeptides of the invention may offer the advantage of enhanced biological activity. Preferred leucine zipper moieties and isoleucine moieties are those that preferentially form trimers. One example is a leucine zipper derived from lung surfactant protein D (SPD), as described in Hoppe et al. (FEBS Letters 344:191, (1994)) and in U.S. patent application Ser. No. 08/446,922, hereby incorporated by reference. Other peptides derived from naturally occurring trimeric proteins may be employed in preparing trimeric polypeptides of the invention.

[0300] In another example, proteins of the invention are associated by interactions between Flag® polypeptide sequence contained in fusion proteins of the invention containing Flag® polypeptide sequence. In a further embodiment, proteins of the invention are associated by interactions between heterologous polypeptide sequence contained in Flag® fusion proteins of the invention and anti-Flag® antibody.

[0301] The multimers of the invention may be generated using chemical techniques known in the art. For example, polypeptides desired to be contained in the multimers of the invention may be chemically cross-linked using linker molecules and linker molecule length optimization techniques known in the art (see, e.g., U.S. Pat. No. 5,478,925, which is herein incorporated by reference in its entirety). Additionally, multimers of the invention may be generated using techniques known in the art to form one or more inter-molecule cross-links between the cysteine residues located within the sequence of the polypeptides desired to be contained in the multimer (see, e.g., U.S. Pat. No. 5,478,925, which is herein incorporated by reference in its entirety). Further, polypeptides of the invention may be routinely modified by the addition of cysteine or biotin to the C-terminus or N-terminus of the polypeptide and techniques known in the art may be applied to generate multimers containing one or more of these modified polypeptides (see, e.g., U.S. Pat. No. 5,478,925, which is herein incorporated by reference in its entirety). Additionally, techniques known in the art may be applied to generate liposomes containing the polypeptide components desired to be contained in the multimer of the invention (see, e.g., U.S. Pat. No. 5,478,925, which is herein incorporated by reference in its entirety).

[0302] Alternatively, multimers of the invention may be generated using genetic engineering techniques known in the art. In one embodiment, polypeptides contained in multimers of the invention are produced recombinantly using fusion protein technology described herein or otherwise known in the art (see, e.g., U.S. Pat. No. 5,478,925, which is herein incorporated by reference in its entirety). In a specific embodiment, polynucleotides coding for a homodimer of the invention are generated by ligating a polynucleotide sequence encoding a polypeptide of the invention to a sequence encoding a linker polypeptide and then further to a synthetic polynucleotide encoding the translated product of the polypeptide in the reverse orientation from the original C-terminus to the N-terminus (lacking the leader sequence) (see, e.g., U.S. Pat. No. 5,478,925, which is herein incorporated by reference in its entirety). In another embodiment, recombinant techniques described herein or otherwise known in the art are applied to generate recombinant polypeptides of the invention which contain a transmembrane domain (or hydrophobic or signal peptide) and which can be incorporated by membrane reconstitution techniques into liposomes (see, e.g., U.S. Pat. No. 5,478,925, which is herein incorporated by reference in its entirety).

[0303] Antibodies

[0304] Further polypeptides of the invention relate to antibodies and T-cell antigen receptors (TCR) which immunospecifically bind a polypeptide, polypeptide fragment, or variant of the invention (e.g., a polypeptide or fragment or variant of the amino acid sequence of SEQ ID NO:Y or a polypeptide encoded by the cDNA contained in ATCC Deposit No:Z, and/or an epitope, of the present invention) as determined by immunoassays well known in the art for assaying specific antibody-antigen binding. Antibodies of the invention include, but are not limited to, polyclonal, monoclonal, multispecific, human, humanized or chimeric antibodies, single chain antibodies, Fab fragments, F(ab′) fragments, fragments produced by a Fab expression library, anti-idiotypic (anti-Id) antibodies (including, e.g., anti-Id antibodies to antibodies of the invention), intracellularly-made antibodies (i.e., intrabodies), and epitope-binding fragments of any of the above. The term “antibody,” as used herein, refers to immunoglobulin molecules and immunologically active portions of immunoglobulin molecules, i.e., molecules that contain an antigen binding site that immunospecifically binds an antigen. The immunoglobulin molecules of the invention can be of any type (e.g., IgG, IgE, IgM, IgD, IgA and IgY), class (e.g., IgG1, IgG2, IgG3, IgG4, IgA1 and IgA2) or subclass of immunoglobulin molecule. In preferred embodiments, the immunoglobulin molecules of the invention are IgG1. In other preferred embodiments, the immunoglobulin molecules of the invention are IgG4.

[0305] Most preferably the antibodies are human antigen-binding antibody fragments of the present invention and include, but are not limited to, Fab, Fab′ and F(ab′)2, Fd, single-chain Fvs (scFv), single-chain antibodies, disulfide-linked Fvs (sdFv) and fragments comprising either a VL or VH domain. Antigen-binding antibody fragments, including single-chain antibodies, may comprise the variable region(s) alone or in combination with the entirety or a portion of the following: hinge region, CH1, CH2, and CH3 domains. Also included in the invention are antigen-binding fragments also comprising any combination of variable region(s) with a hinge region, CH1, CH2, and CH3 domains. The antibodies of the invention may be from any animal origin including birds and mammals. Preferably, the antibodies are human, murine (e.g., mouse and rat), donkey, ship rabbit, goat, guinea pig, camel, horse, or chicken. As used herein, “human” antibodies include antibodies having the amino acid sequence of a human immunoglobulin and include antibodies isolated from human immunoglobulin libraries or from animals transgenic for one or more human immunoglobulin and that do not express endogenous immunoglobulins, as described infra and, for example in, U.S. Pat. No. 5,939,598 by Kucherlapati et al.

[0306] The antibodies of the present invention may be monospecific, bispecific, trispecific or of greater multispecificity. Multispecific antibodies may be specific for different epitopes of a polypeptide of the present invention or may be specific for both a polypeptide of the present invention as well as for a heterologous epitope, such as a heterologous polypeptide or solid support material. See, e.g., PCT publications WO 93/17715; WO 92/08802; WO 91/00360; WO 92/05793; Tutt, et al., J. Immunol. 147:60-69 (1991); U.S. Pat. Nos. 4,474,893; 4,714,681; 4,925,648; 5,573,920; 5,601,819; Kostelny et al., J. Immunol. 148:1547-1553 (1992).

[0307] Antibodies of the present invention may be described or specified in terms of the epitope(s) or portion(s) of a polypeptide of the present invention which they recognize or specifically bind. The epitope(s) or polypeptide portion(s) may be specified as described herein, e.g., by N-terminal and C-terminal positions, or by size in contiguous amino acid residues, or listed in the Tables and Figures. Preferred epitopes of the invention include the predicted epitopes shown in Table 1B, as well as polynucleotides that encode these epitopes. Antibodies which specifically bind any epitope or polypeptide of the present invention may also be excluded. Therefore, the present invention includes antibodies that specifically bind polypeptides of the present invention, and allows for the exclusion of the same.

[0308] Antibodies of the present invention may also be described or specified in terms of their cross-reactivity. Antibodies that do not bind any other analog, ortholog, or homolog of a polypeptide of the present invention are included. Antibodies that bind polypeptides with at least 95%, at least 90%, at least 85%, at least 80%, at least 75%, at least 70%, at least 65%, at least 60%, at least 55%, and at least 50% identity (as calculated using methods known in the art and described herein) to a polypeptide of the present invention are also included in the present invention. In specific embodiments, antibodies of the present invention cross-react with murine, rat and/or rabbit homologs of human proteins and the corresponding epitopes thereof. Antibodies that do not bind polypeptides with less than 95%, less than 90%, less than 85%, less than 80%, less than 75%, less than 70%, less than 65%, less than 60%, less than 55%, and less than 50% identity (as calculated using methods known in the art and described herein) to a polypeptide of the present invention are also included in the present invention. In a specific embodiment, the above-described cross-reactivity is with respect to any single specific antigenic or immunogenic polypeptide, or combination(s) of 2, 3, 4, 5, or more of the specific antigenic and/or immunogenic polypeptides disclosed herein. Further included in the present invention are antibodies which bind polypeptides encoded by polynucleotides which hybridize to a polynucleotide of the present invention under stringent hybridization conditions (as described herein). Antibodies of the present invention may also be described or specified in terms of their binding affinity to a polypeptide of the invention. Preferred binding affinities include those with a dissociation constant or Kd less than 5×10⁻² M, 10⁻² M, 5×10⁻³ M, 10⁻³ M, 5×10⁻⁴ M, 10⁻⁴ M, 5×10⁻⁵ M, 10⁻⁵ M, 5×10⁻⁶ M, 10⁻⁶ M, 5×10⁻⁷ M, 10⁻⁷ M, 5×10⁻⁸ M, 10⁻⁸ M, 5×10⁻⁹ M, 10⁻⁹ M, 5×10⁻¹⁰ M, 10⁻¹⁰ M, 5×10⁻¹¹ M, 10⁻¹¹ M, 5×10⁻¹² M, 10⁻¹² M, 5×10⁻¹³ M, 10⁻¹³ M, 5×10⁻¹⁴ M, 10⁻¹⁴ M, 5×10⁻¹⁵ M, or 10⁻¹⁵ M.

[0309] The invention also provides antibodies that competitively inhibit binding of an antibody to an epitope of the invention as determined by any method known in the art for determining competitive binding, for example, the immunoassays described herein. In preferred embodiments, the antibody competitively inhibits binding to the epitope by at least 95%, at least 90%, at least 85%, at least 80%, at least 75%, at least 70%, at least 60%, or at least 50%.

[0310] Antibodies of the present invention may act as agonists or antagonists of the polypeptides of the present invention. For example, the present invention includes antibodies which disrupt the receptor/ligand interactions with the polypeptides of the invention either partially or fully. Preferably, antibodies of the present invention bind an antigenic epitope disclosed herein, or a portion thereof. The invention features both receptor-specific antibodies and ligand-specific antibodies. The invention also features receptor-specific antibodies which do not prevent ligand binding but prevent receptor activation. Receptor activation (i.e., signaling) may be determined by techniques described herein or otherwise known in the art. For example, receptor activation can be determined by detecting the phosphorylation (e.g., tyrosine or serine/threonine) of the receptor or its substrate by immunoprecipitation followed by western blot analysis (for example, as described supra). In specific embodiments, antibodies are provided that inhibit ligand activity or receptor activity by at least 95%, at least 90%, at least 85%, at least 80%, at least 75%, at least 70%, at least 60%, or at least 50% of the activity in absence of the antibody.

[0311] The invention also features receptor-specific antibodies which both prevent ligand binding and receptor activation as well as antibodies that recognize the receptor-ligand complex, and, preferably, do not specifically recognize the unbound receptor or the unbound ligand. Likewise, included in the invention are neutralizing antibodies which bind the ligand and prevent binding of the ligand to the receptor, as well as antibodies which bind the ligand, thereby preventing receptor activation, but do not prevent the ligand from binding the receptor. Further included in the invention are antibodies which activate the receptor. These antibodies may act as receptor agonists, i.e., potentiate or activate either all or a subset of the biological activities of the ligand-mediated receptor activation, for example, by inducing dimerization of the receptor. The antibodies may be specified as agonists, antagonists or inverse agonists for biological activities comprising the specific biological activities of the peptides of the invention disclosed herein. The above antibody agonists can be made using methods known in the art. See, e.g., PCT publication WO 96/40281; U.S. Pat. No. 5,811,097; Deng et al., Blood 92(6):1981-1988 (1998); Chen et al., Cancer Res. 58(16):3668-3678 (1998); Harrop et al., J. Immunol. 161(4):1786-1794 (1998); Zhu et al., Cancer Res. 58(15):3209-3214 (1998); Yoon et al., J. Immunol. 160(7):3170-3179 (1998); Prat et al., J. Cell. Sci. 111(Pt2):237-247 (1998); Pitard et al., J. Immunol. Methods 205(2):177-190 (1997); Liautard et al., Cytokine 9(4):233-241 (1997); Carlson et al., J. Biol. Chem. 272(17):11295-11301 (1997); Taryman et al., Neuron 14(4):755-762 (1995); Muller et al., Structure 6(9):1153-1167 (1998); Bartunek et al., Cytokine 8(1):14-20 (1996) (which are all incorporated by reference herein in their entireties).

[0312] Antibodies of the present invention may be used, for example, to purify, detect, and target the polypeptides of the present invention, including both in vitro and in vivo diagnostic and therapeutic methods. For example, the antibodies have utility in immunoassays for qualitatively and quantitatively measuring levels of the polypeptides of the present invention in biological samples. See, e.g., Harlow et al., Antibodies: A Laboratory Manual, (Cold Spring Harbor Laboratory Press, 2nd ed. 1988); incorporated by reference herein in its entirety.

[0313] As discussed in more detail below, the antibodies of the present invention may be used either alone or in combination with other compositions. The antibodies may further be recombinantly fused to a heterologous polypeptide at the N- or C-terminus or chemically conjugated (including covalent and non-covalent conjugations) to polypeptides or other compositions. For example, antibodies of the present invention may be recombinantly fused or conjugated to molecules useful as labels in detection assays and effector molecules such as heterologous polypeptides, drugs, radionuclides, or toxins. See, e.g., PCT publications WO 92/08495; WO 91/14438; WO 89/12624; U.S. Pat. No. 5,314,995; and EP 396,387; the disclosures of which are incorporated herein by reference in their entireties.

[0314] The antibodies of the invention include derivatives that are modified, i.e, by the covalent attachment of any type of molecule to the antibody such that covalent attachment does not prevent the antibody from generating an anti-idiotypic response. For example, but not by way of limitation, the antibody derivatives include antibodies that have been modified, e.g., by glycosylation, acetylation, pegylation, phosphylation, amidation, derivatization by known protecting/blocking groups, proteolytic cleavage, linkage to a cellular ligand or other protein, etc. Any of numerous chemical modifications may be carried out by known techniques, including, but not limited to specific chemical cleavage, acetylation, formylation, metabolic synthesis of tunicamycin, etc. Additionally, the derivative may contain one or more non-classical amino acids.

[0315] The antibodies of the present invention may be generated by any suitable method known in the art. Polyclonal antibodies to an antigen-of-interest can be produced by various procedures well known in the art. For example, a polypeptide of the invention can be administered to various host animals including, but not limited to, rabbits, mice, rats, etc. to induce the production of sera containing polyclonal antibodies specific for the antigen. Various adjuvants may be used to increase the immunological response, depending on the host species, and include but are not limited to, Freund's (complete and incomplete), mineral gels such as aluminum hydroxide, surface active substances such as lysolecithin, pluronic polyols, polyanions, peptides, oil emulsions, keyhole limpet hemocyanins, dinitrophenol, and potentially useful human adjuvants such as BCG (bacille Calmette-Guerin) and corynebacterium parvum. Such adjuvants are also well known in the art.

[0316] Monoclonal antibodies can be prepared using a wide variety of techniques known in the art including the use of hybridoma, recombinant, and phage display technologies, or a combination thereof. For example, monoclonal antibodies can be produced using hybridoma techniques including those known in the art and taught, for example, in Harlow et al., Antibodies: A Laboratory Manual, (Cold Spring Harbor Laboratory Press, 2nd ed. 1988); Hammerling, et al., in: Monoclonal Antibodies and T-Cell Hybridomas 563-681 (Elsevier, N.Y., 1981) (said references incorporated by reference in their entireties). The term “monoclonal antibody” as used herein is not limited to antibodies produced through hybridoma technology. The term “monoclonal antibody” refers to an antibody that is derived from a single clone, including any eukaryotic, prokaryotic, or phage clone, and not the method by which it is produced.

[0317] Methods for producing and screening for specific antibodies using hybridoma technology are routine and well known in the art and are discussed in detail in the Examples. In a non-limiting example, mice can be immunized with a polypeptide of the invention or a cell expressing such peptide. Once an immune response is detected, e.g., antibodies specific for the antigen are detected in the mouse serum, the mouse spleen is harvested and splenocytes isolated. The splenocytes are then fused by well known techniques to any suitable myeloma cells, for example cells from cell line SP20 available from the ATCC. Hybridomas are selected and cloned by limited dilution. The hybridoma clones are then assayed by methods known in the art for cells that secrete antibodies capable of binding a polypeptide of the invention. Ascites fluid, which generally contains high levels of antibodies, can be generated by immunizing mice with positive hybridoma clones.

[0318] Accordingly, the present invention provides methods of generating monoclonal antibodies as well as antibodies produced by the method comprising culturing a hybridoma cell secreting an antibody of the invention wherein, preferably, the hybridoma is generated by fusing splenocytes isolated from a mouse immunized with an antigen of the invention with myeloma cells and then screening the hybridomas resulting from the fusion for hybridoma clones that secrete an antibody able to bind a polypeptide of the invention.

[0319] Another well known method for producing both polyclonal and monoclonal human B cell lines is transformation using Epstein Barr Virus (EBV). Protocols for generating EBV-transformed B cell lines are commonly known in the art, such as, for example, the protocol outlined in Chapter 7.22 of Current Protocols in Immunology, Coligan et al., Eds., 1994, John Wiley & Sons, NY, which is hereby incorporated in its entirety by reference. The source of B cells for transformation is commonly human peripheral blood, but B cells for transformation may also be derived from other sources including, but not limited to, lymph nodes, tonsil, spleen, tumor tissue, and infected tissues. Tissues are generally made into single cell suspensions prior to EBV transformation. Additionally, steps may be taken to either physically remove or inactivate T cells (e.g., by treatment with cyclosporin A) in B cell-containing samples, because T cells from individuals seropositive for anti-EBV antibodies can suppress B cell immortalization by EBV.

[0320] In general, the sample containing human B cells is innoculated with EBV, and cultured for 3-4 weeks. A typical source of EBV is the culture supernatant of the B95-8 cell line (ATCC #VR-1492). Physical signs of EBV transformation can generally be seen towards the end of the 3-4 week culture period. By phase-contrast microscopy, transformed cells may appear large, clear, hairy and tend to aggregate in tight clusters of cells. Initially, EBV lines are generally polyclonal. However, over prolonged periods of cell cultures, EBV lines may become monoclonal or polyclonal as a result of the selective outgrowth of particular B cell clones. Alternatively, polyclonal EBV transformed lines may be subcloned (e.g., by limiting dilution culture) or fused with a suitable fusion partner and plated at limiting dilution to obtain monoclonal B cell lines. Suitable fusion partners for EBV transformed cell lines include mouse myeloma cell lines (e.g., SP2/0, X63-Ag8.653), heteromyeloma cell lines (human×mouse; e.g, SPAM-8, SBC-H20, and CB-F7), and human cell lines (e.g., GM 1500, SKO-007, RPMI 8226, and KR-4). Thus, the present invention also provides a method of generating polyclonal or monoclonal human antibodies against polypeptides of the invention or fragments thereof, comprising EBV-transformation of human B cells.

[0321] Antibody fragments which recognize specific epitopes may be generated by known techniques. For example, Fab and F(ab′)2 fragments of the invention may be produced by proteolytic cleavage of immunoglobulin molecules, using enzymes such as papain (to produce Fab fragments) or pepsin (to produce F(ab′)2 fragments). F(ab′)2 fragments contain the variable region, the light chain constant region and the CH1 domain of the heavy chain.

[0322] For example, the antibodies of the present invention can also be generated using various phage display methods known in the art. In phage display methods, functional antibody domains are displayed on the surface of phage particles which carry the polynucleotide sequences encoding them. In a particular embodiment, such phage can be utilized to display antigen binding domains expressed from a repertoire or combinatorial antibody library (e.g., human or murine). Phage expressing an antigen binding domain that binds the antigen of interest can be selected or identified with antigen, e.g., using labeled antigen or antigen bound or captured to a solid surface or bead. Phage used in these methods are typically filamentous phage including fd and M13 binding domains expressed from phage with Fab, Fv or disulfide stabilized Fv antibody domains recombinantly fused to either the phage gene III or gene VIII protein. Examples of phage display methods that can be used to make the antibodies of the present invention include those disclosed in Brinkman et al., J. Immunol. Methods 182:41-50 (1995); Ames et al., J. Immunol. Methods 184:177-186 (1995); Kettleborough et al., Eur. J. Immunol. 24:952-958 (1994); Persic et al., Gene 187 9-18 (1997); Burton et al., Advances in Immunology 57:191-280 (1994); PCT application No. PCT/GB91/01134; PCT publications WO 90/02809; WO 91/10737; WO 92/01047; WO 92/18619; WO 93/11236; WO 95/15982; WO 95/20401; and U.S. Pat. Nos. 5,698,426; 5,223,409; 5,403,484; 5,580,717; 5,427,908; 5,750,753; 5,821,047; 5,571,698; 5,427,908; 5,516,637; 5,780,225; 5,658,727; 5,733,743 and 5,969,108; each of which is incorporated herein by reference in its entirety.

[0323] As described in the above references, after phage selection, the antibody coding regions from the phage can be isolated and used to generate whole antibodies, including human antibodies, or any other desired antigen binding fragment, and expressed in any desired host, including mammalian cells, insect cells, plant cells, yeast, and bacteria, e.g., as described in detail below. For example, techniques to recombinantly produce Fab, Fab′ and F(ab′)2 fragments can also be employed using methods known in the art such as those disclosed in PCT publication WO 92/22324; Mullinax et al., BioTechniques 12(6):864-869 (1992); and Sawai et al., AJRI 34:26-34 (1995); and Better et al., Science 240:1041-1043 (1988) (said references incorporated by reference in their entireties).

[0324] Examples of techniques which can be used to produce single-chain Fvs and antibodies include those described in U.S. Pat. Nos. 4,946,778 and 5,258,498; Huston et al., Methods in Enzymology 203:46-88 (1991); Shu et al., PNAS 90:7995-7999 (1993); and Skerra et al., Science 240:1038-1040 (1988). For some uses, including in vivo use of antibodies in humans and in vitro detection assays, it may be preferable to use chimeric, humanized, or human antibodies. A chimeric antibody is a molecule in which different portions of the antibody are derived from different animal species, such as antibodies having a variable region derived from a murine monoclonal antibody and a human immunoglobulin constant region. Methods for producing chimeric antibodies are known in the art. See e.g., Morrison, Science 229:1202 (1985); Oi et al., BioTechniques 4:214 (1986); Gillies et al., (1989) J. Immunol. Methods 125:191-202; U.S. Pat. Nos. 5,807,715; 4,816,567; and 4,816,397, which are incorporated herein by reference in their entirety. Humanized antibodies are antibody molecules from non-human species antibody that binds the desired antigen having one or more complementarity determining regions (CDRs) from the non-human species and a framework regions from a human immunoglobulin molecule. Often, framework residues in the human framework regions will be substituted with the corresponding residue from the CDR donor antibody to alter, preferably improve, antigen binding. These framework substitutions are identified by methods well known in the art, e.g., by modeling of the interactions of the CDR and framework residues to identify framework residues important for antigen binding and sequence comparison to identify unusual framework residues at particular positions. (See, e.g., Queen et al., U.S. Pat. No. 5,585,089; Riechmann et al., Nature 332:323 (1988), which are incorporated herein by reference in their entireties.) Antibodies can be humanized using a variety of techniques known in the art including, for example, CDR-grafting (EP 239,400; PCT publication WO 91/09967; U.S. Pat. Nos. 5,225,539; 5,530,101; and 5,585,089), veneering or resurfacing (EP 592,106; EP 519,596; Padlan, Molecular Immunology 28(4/5):489-498 (1991); Studnicka et al., Protein Engineering 7(6):805-814 (1994); Roguska. et al., PNAS 91:969-973 (1994)), and chain shuffling (U.S. Pat. No. 5,565,332).

[0325] Completely human antibodies are particularly desirable for therapeutic treatment of human patients. Human antibodies can be made by a variety of methods known in the art including phage display methods described above using antibody libraries derived from human immunoglobulin sequences. See also, U.S. Pat. Nos. 4,444,887 and 4,716,111; and PCT publications WO 98/46645, WO 98/50433, WO 98/24893, WO 98/16654, WO 96/34096, WO 96/33735, and WO 91/10741; each of which is incorporated herein by reference in its entirety.

[0326] Human antibodies can also be produced using transgenic mice which are incapable of expressing functional endogenous immunoglobulins, but which can express human immunoglobulin genes. For example, the human heavy and light chain immunoglobulin gene complexes may be introduced randomly or by homologous recombination into mouse embryonic stem cells. Alternatively, the human variable region, constant region, and diversity region may be introduced into mouse embryonic stem cells in addition to the human heavy and light chain genes. The mouse heavy and light chain immunoglobulin genes may be rendered non-functional separately or simultaneously with the introduction of human immunoglobulin loci by homologous recombination. In particular, homozygous deletion of the JH region prevents endogenous antibody production. The modified embryonic stem cells are expanded and microinjected into blastocysts to produce chimeric mice. The chimeric mice are then bred to produce homozygous offspring which express human antibodies. The transgenic mice are immunized in the normal fashion with a selected antigen, e.g., all or a portion of a polypeptide of the invention. Monoclonal antibodies directed against the antigen can be obtained from the immunized, transgenic mice using conventional hybridoma technology. The human immunoglobulin transgenes harbored by the transgenic mice rearrange during B cell differentiation, and subsequently undergo class switching and somatic mutation. Thus, using such a technique, it is possible to produce therapeutically useful IgG, IgA, IgM and IgE antibodies. For an overview of this technology for producing human antibodies, see Lonberg and Huszar, Int. Rev. Immunol. 13:65-93 (1995). For a detailed discussion of this technology for producing human antibodies and human monoclonal antibodies and protocols for producing such antibodies, see, e.g., PCT publications WO 98/24893; WO 92/01047; WO 96/34096; WO 96/33735; European Patent No. 0 598 877; U.S. Pat. Nos. 5,413,923; 5,625,126; 5,633,425; 5,569,825; 5,661,016; 5,545,806; 5,814,318; 5,885,793; 5,916,771; 5,939,598; 6,075,181; and 6,114,598, which are incorporated by reference herein in their entirety. In addition, companies such as Abgenix, Inc. (Freemont, Calif.) and Genpharm (San Jose, Calif.) can be engaged to provide human antibodies directed against a selected antigen using technology similar to that described above.

[0327] Completely human antibodies which recognize a selected epitope can be generated using a technique referred to as “guided selection.” In this approach a selected non-human monoclonal antibody, e.g., a mouse antibody, is used to guide the selection of a completely human antibody recognizing the same epitope. (Jespers et al., Bio/technology 12:899-903 (1988)).

[0328] Further, antibodies to the polypeptides of the invention can, in turn, be utilized to generate anti-idiotype antibodies that “mimic” polypeptides of the invention using techniques well known to those skilled in the art. (See, e.g., Greenspan & Bona, FASEB J. 7(5):437-444; (1989) and Nissinoff, J. Immunol. 147(8):2429-2438 (1991)). For example, antibodies which bind to and competitively inhibit polypeptide multimerization and/or binding of a polypeptide of the invention to a ligand can be used to generate anti-idiotypes that “mimic” the polypeptide multimerization and/or binding domain and, as a consequence, bind to and neutralize polypeptide and/or its ligand. Such neutralizing anti-idiotypes or Fab fragments of such anti-idiotypes can be used in therapeutic regimens to neutralize polypeptide ligand(s)/receptor(s). For example, such anti-idiotypic antibodies can be used to bind a polypeptide of the invention and/or to bind its ligand(s)/receptor(s), and thereby block its biological activity. Alternatively, antibodies which bind to and enhance polypeptide multimerization and/or binding, and/or receptor/ligand multimerization, binding and/or signaling can be used to generate anti-idiotypes that function as agonists of a polypeptide of the invention and/or its ligand/receptor. Such agonistic anti-idiotypes or Fab fragments of such anti-idiotypes can be used in therapeutic regimens as agonists of the polypeptides of the invention or its ligand(s)/receptor(s). For example, such anti-idiotypic antibodies can be used to bind a polypeptide of the invention and/or to bind its ligand(s)/receptor(s), and thereby promote or enhance its biological activity.

[0329] Intrabodies of the invention can be produced using methods known in the art, such as those disclosed and reviewed in Chen et al., Hum. Gene Ther. 5:595-601 (1994); Marasco, W. A., Gene Ther. 4:11-15 (1997); Rondon and Marasco, Annu. Rev. Microbiol. 51:257-283 (1997); Proba et al., J. Mol. Biol. 275:245-253 (1998); Cohen et al., Oncogene 17:2445-2456 (1998); Ohage and Steipe, J. Mol. Biol. 291:1119-1128 (1999); Ohage et al., J. Mol. Biol. 291:1129-1134 (1999); Wirtz and Steipe, Protein Sci. 8:2245-2250 (1999); Zhu et al., J. Immunol. Methods 231:207-222 (1999); and references cited therein.

[0330] Polynucleotides Encoding Antibodies

[0331] The invention further provides polynucleotides comprising a nucleotide sequence encoding an antibody of the invention and fragments thereof. The invention also encompasses polynucleotides that hybridize under stringent or alternatively, under lower stringency hybridization conditions, e.g., as defined supra, to polynucleotides that encode an antibody, preferably, that specifically binds to a polypeptide of the invention, preferably, an antibody that binds to a polypeptide having the amino acid sequence of SEQ ID NO:Y, to a polypeptide encoded by a portion of SEQ ID NO:X as defined in columns 8 and 9 of Table 2, and/or to a polypeptide encoded by the cDNA contained in ATCC Deposit No:Z.

[0332] The polynucleotides may be obtained, and the nucleotide sequence of the polynucleotides determined, by any method known in the art. For example, if the nucleotide sequence of the antibody is known, a polynucleotide encoding the antibody may be assembled from chemically synthesized oligonucleotides (e.g., as described in Kutmeier et al., BioTechniques 17:242 (1994)), which, briefly, involves the synthesis of overlapping oligonucleotides containing portions of the sequence encoding the antibody, annealing and ligating of those oligonucleotides, and then amplification of the ligated oligonucleotides by PCR.

[0333] Alternatively, a polynucleotide encoding an antibody may be generated from nucleic acid from a suitable source. If a clone containing a nucleic acid encoding a particular antibody is not available, but the sequence of the antibody molecule is known, a nucleic acid encoding the immunoglobulin may be chemically synthesized or obtained from a suitable source (e.g., an antibody cDNA library, or a cDNA library generated from, or nucleic acid, preferably poly A+ RNA, isolated from, any tissue or cells expressing the antibody, such as hybridoma cells selected to express an antibody of the invention) by PCR amplification using synthetic primers hybridizable to the 3′ and 5′ ends of the sequence or by cloning using an oligonucleotide probe specific for the particular gene sequence to identify, e.g., a cDNA clone from a cDNA library that encodes the antibody. Amplified nucleic acids generated by PCR may then be cloned into replicable cloning vectors using any method well known in the art.

[0334] Once the nucleotide sequence and corresponding amino acid sequence of the antibody is determined, the nucleotide sequence of the antibody may be manipulated using methods well known in the art for the manipulation of nucleotide sequences, e.g., recombinant DNA techniques, site directed mutagenesis, PCR, etc. (see, for example, the techniques described in Sambrook et al., 1990, Molecular Cloning, A Laboratory Manual, 2d Ed., Cold Spring Harbor Laboratory, Cold Spring Harbor, N.Y. and Ausubel et al., eds., 1998, Current Protocols in Molecular Biology, John Wiley & Sons, NY, which are both incorporated by reference herein in their entireties), to generate antibodies having a different amino acid sequence, for example to create amino acid substitutions, deletions, and/or insertions.

[0335] In a specific embodiment, the amino acid sequence of the heavy and/or light chain variable domains may be inspected to identify the sequences of the complementarity determining regions (CDRs) by methods that are well know in the art, e.g., by comparison to known amino acid sequences of other heavy and light chain variable regions to determine the regions of sequence hypervariability. Using routine recombinant DNA techniques, one or more of the CDRs may be inserted within framework regions, e.g., into human framework regions to humanize a non-human antibody, as described supra. The framework regions may be naturally occurring or consensus framework regions, and preferably human framework regions (see, e.g., Chothia et al., J. Mol. Biol. 278: 457-479 (1998) for a listing of human framework regions). Preferably, the polynucleotide generated by the combination of the framework regions and CDRs encodes an antibody that specifically binds a polypeptide of the invention. Preferably, as discussed supra, one or more amino acid substitutions may be made within the framework regions, and, preferably, the amino acid substitutions improve binding of the antibody to its antigen. Additionally, such methods may be used to make amino acid substitutions or deletions of one or more variable region cysteine residues participating in an intrachain disulfide bond to generate antibody molecules lacking one or more intrachain disulfide bonds. Other alterations to the polynucleotide are encompassed by the present invention and within the skill of the art.

[0336] In addition, techniques developed for the production of “chimeric antibodies” (Morrison et al., Proc. Natl. Acad. Sci. 81:851-855 (1984); Neuberger et al., Nature 312:604-608 (1984); Takeda et al., Nature 314:452-454 (1985)) by splicing genes from a mouse antibody molecule of appropriate antigen specificity together with genes from a human antibody molecule of appropriate biological activity can be used. As described supra, a chimeric antibody is a molecule in which different portions are derived from different animal species, such as those having a variable region derived from a murine mAb and a human immunoglobulin constant region, e.g., humanized antibodies.

[0337] Alternatively, techniques described for the production of single chain antibodies (U.S. Pat. No. 4,946,778; Bird, Science 242:423-42 (1988); Huston et al., Proc. Natl. Acad. Sci. USA 85:5879-5883 (1988); and Ward et al., Nature 334:544-54 (1989)) can be adapted to produce single chain antibodies. Single chain antibodies are formed by linking the heavy and light chain fragments of the Fv region via an amino acid bridge, resulting in a single chain polypeptide. Techniques for the assembly of functional Fv fragments in E. coli may also be used (Skerra et al., Science 242:1038-1041 (1988)).

[0338] Methods of Producing Antibodies

[0339] The antibodies of the invention can be produced by any method known in the art for the synthesis of antibodies, in particular, by chemical synthesis or preferably, by recombinant expression techniques. Methods of producing antibodies include, but are not limited to, hybridoma technology, EBV transformation, and other methods discussed herein as well as through the use recombinant DNA technology, as discussed below.

[0340] Recombinant expression of an antibody of the invention, or fragment, derivative or analog thereof, (e.g., a heavy or light chain of an antibody of the invention or a single chain antibody of the invention), requires construction of an expression vector containing a polynucleotide that encodes the antibody. Once a polynucleotide encoding an antibody molecule or a heavy or light chain of an antibody, or portion thereof (preferably containing the heavy or light chain variable domain), of the invention has been obtained, the vector for the production of the antibody molecule may be produced by recombinant DNA technology using techniques well known in the art. Thus, methods for preparing a protein by expressing a polynucleotide containing an antibody encoding nucleotide sequence are described herein. Methods which are well known to those skilled in the art can be used to construct expression vectors containing antibody coding sequences and appropriate transcriptional and translational control signals. These methods include, for example, in vitro recombinant DNA techniques, synthetic techniques, and in vivo genetic recombination. The invention, thus, provides replicable vectors comprising a nucleotide sequence encoding an antibody molecule of the invention, or a heavy or light chain thereof, or a heavy or light chain variable domain, operably linked to a promoter. Such vectors may include the nucleotide sequence encoding the constant region of the antibody molecule (see, e.g., PCT Publication WO 86/05807; PCT Publication WO 89/01036; and U.S. Pat. No. 5,122,464) and the variable domain of the antibody may be cloned into such a vector for expression of the entire heavy or light chain.

[0341] The expression vector is transferred to a host cell by conventional techniques and the transfected cells are then cultured by conventional techniques to produce an antibody of the invention. Thus, the invention includes host cells containing a polynucleotide encoding an antibody of the invention, or a heavy or light chain thereof, or a single chain antibody of the invention, operably linked to a heterologous promoter. In preferred embodiments for the expression of double-chained antibodies, vectors encoding both the heavy and light chains may be co-expressed in the host cell for expression of the entire immunoglobulin molecule, as detailed below.

[0342] A variety of host-expression vector systems may be utilized to express the antibody molecules of the invention. Such host-expression systems represent vehicles by which the coding sequences of interest may be produced and subsequently purified, but also represent cells which may, when transformed or transfected with the appropriate nucleotide coding sequences, express an antibody molecule of the invention in situ. These include but are not limited to microorganisms such as bacteria (e.g., E. coli, B. subtilis) transformed with recombinant bacteriophage DNA, plasmid DNA or cosmid DNA expression vectors containing antibody coding sequences; yeast (e.g., Saccharomyces, Pichia) transformed with recombinant yeast expression vectors containing antibody coding sequences; insect cell systems infected with recombinant virus expression vectors (e.g., baculovirus) containing antibody coding sequences; plant cell systems infected with recombinant virus expression vectors (e.g., cauliflower mosaic virus, CaMV; tobacco mosaic virus, TMV) or transformed with recombinant plasmid expression vectors (e.g., Ti plasmid) containing antibody coding sequences; or mammalian cell systems (e.g., COS, CHO, BHK, 293, 3T3 cells) harboring recombinant expression constructs containing promoters derived from the genome of mammalian cells (e.g., metallothionein promoter) or from mammalian viruses (e.g., the adenovirus late promoter; the vaccinia virus 7.5K promoter). Preferably, bacterial cells such as Escherichia coli, and more preferably, eukaryotic cells, especially for the expression of whole recombinant antibody molecule, are used for the expression of a recombinant antibody molecule. For example, mammalian cells such as Chinese hamster ovary cells (CHO), in conjunction with a vector such as the major intermediate early gene promoter element from human cytomegalovirus is an effective expression system for antibodies (Foecking et al., Gene 45:101 (1986); Cockett et al., Bio/Technology 8:2 (1990)).

[0343] In bacterial systems, a number of expression vectors may be advantageously selected depending upon the use intended for the antibody molecule being expressed. For example, when a large quantity of such a protein is to be produced, for the generation of pharmaceutical compositions of an antibody molecule, vectors which direct the expression of high levels of fusion protein products that are readily purified may be desirable. Such vectors include, but are not limited, to the E. coli expression vector pUR278 (Ruther et al., EMBO J. 2:1791 (1983)), in which the antibody coding sequence may be ligated individually into the vector in frame with the lac Z coding region so that a fusion protein is produced; pIN vectors (Inouye & Inouye, Nucleic Acids Res. 13:3101-3109 (1985); Van Heeke & Schuster, J. Biol. Chem. 24:5503-5509 (1989)); and the like. pGEX vectors may also be used to express foreign polypeptides as fusion proteins with glutathione S-transferase (GST). In general, such fusion proteins are soluble and can easily be purified from lysed cells by adsorption and binding to matrix glutathione-agarose beads followed by elution in the presence of free glutathione. The pGEX vectors are designed to include thrombin or factor Xa protease cleavage sites so that the cloned target gene product can be released from the GST moiety.

[0344] In an insect system, Autographa californica nuclear polyhedrosis virus (AcNPV) is used as a vector to express foreign genes. The virus grows in Spodoptera frugiperda cells. The antibody coding sequence may be cloned individually into non-essential regions (for example the polyhedrin gene) of the virus and placed under control of an AcNPV promoter (for example the polyhedrin promoter).

[0345] In mammalian host cells, a number of viral-based expression systems may be utilized. In cases where an adenovirus is used as an expression vector, the antibody coding sequence of interest may be ligated to an adenovirus transcription/translation control complex, e.g., the late promoter and tripartite leader sequence. This chimeric gene may then be inserted in the adenovirus genome by in vitro or in vivo recombination. Insertion in a non-essential region of the viral genome (e.g., region E1 or E3) will result in a recombinant virus that is viable and capable of expressing the antibody molecule in infected hosts. (e.g., see Logan & Shenk, Proc. Natl. Acad. Sci. USA 81:355-359 (1984)). Specific initiation signals may also be required for efficient translation of inserted antibody coding sequences. These signals include the ATG initiation codon and adjacent sequences. Furthermore, the initiation codon must be in phase with the reading frame of the desired coding sequence to ensure translation of the entire insert. These exogenous translational control signals and initiation codons can be of a variety of origins, both natural and synthetic. The efficiency of expression may be enhanced by the inclusion of appropriate transcription enhancer elements, transcription terminators, etc. (see Bittner et al., Methods in Enzymol. 153:51-544 (1987)).

[0346] In addition, a host cell strain may be chosen which modulates the expression of the inserted sequences, or modifies and processes the gene product in the specific fashion desired. Such modifications (e.g., glycosylation) and processing (e.g., cleavage) of protein products may be important for the function of the protein. Different host cells have characteristic and specific mechanisms for the post-translational processing and modification of proteins and gene products. Appropriate cell lines or host systems can be chosen to ensure the correct modification and processing of the foreign protein expressed. To this end, eukaryotic host cells which possess the cellular machinery for proper processing of the primary transcript, glycosylation, and phosphorylation of the gene product may be used. Such mammalian host cells include but are not limited to CHO, VERY, BHK, Hela, COS, MDCK, 293, 3T3, WI38, and in particular, breast cancer cell lines such as, for example, BT483, Hs578T, HTB2, BT20 and T47D, and normal mammary gland cell line such as, for example, CRL7030 and Hs578Bst.

[0347] For long-term, high-yield production of recombinant proteins, stable expression is preferred. For example, cell lines which stably express the antibody molecule may be engineered. Rather than using expression vectors which contain viral origins of replication, host cells can be transformed with DNA controlled by appropriate expression control elements (e.g., promoter, enhancer, sequences, transcription terminators, polyadenylation sites, etc.), and a selectable marker. Following the introduction of the foreign DNA, engineered cells may be allowed to grow for 1-2 days in an enriched media, and then are switched to a selective media. The selectable marker in the recombinant plasmid confers resistance to the selection and allows cells to stably integrate the plasmid into their chromosomes and grow to form foci which in turn can be cloned and expanded into cell lines. This method may advantageously be used to engineer cell lines which express the antibody molecule. Such engineered cell lines may be particularly useful in screening and evaluation of compounds that interact directly or indirectly with the antibody molecule.

[0348] A number of selection systems may be used, including but not limited to the herpes simplex virus thymidine kinase (Wigler et al., Cell 11:223 (1977)), hypoxanthine-guanine phosphoribosyltransferase (Szybalska & Szybalski, Proc. Natl. Acad. Sci. USA 48:202 (1992)), and adenine phosphoribosyltransferase (Lowy et al., Cell 22:817 (1980)) genes can be employed in tk−, hgprt− or aprt− cells, respectively. Also, antimetabolite resistance can be used as the basis of selection for the following genes: dhfr, which confers resistance to methotrexate (Wigler et al., Natl. Acad. Sci. USA 77:357 (1980); O'Hare et al., Proc. Natl. Acad. Sci. USA 78:1527 (1981)); gpt, which confers resistance to mycophenolic acid (Mulligan & Berg, Proc. Natl. Acad. Sci. USA 78:2072 (1981)); neo, which confers resistance to the aminoglycoside G-418 Clinical Pharmacy 12:488-505; Wu and Wu, Biotherapy 3:87-95 (1991); Tolstoshev, Ann. Rev. Pharmacol. Toxicol. 32:573-596 (1993); Mulligan, Science 260:926-932 (1993); and Morgan and Anderson, Ann. Rev. Biochem. 62:191-217 (1993); May, 1993, TIB TECH 11(5):155-215 (1993)); and hygro, which confers resistance to hygromycin (Santerre et al., Gene 30:147 (1984)). Methods commonly known in the art of recombinant DNA technology may be routinely applied to select the desired recombinant clone, and such methods are described, for example, in Ausubel et al. (eds.), Current Protocols in Molecular Biology, John Wiley & Sons, NY (1993); Kriegler, Gene Transfer and Expression, A Laboratory Manual, Stockton Press, NY (1990); and in Chapters 12 and 13, Dracopoli et al. (eds), Current Protocols in Human Genetics, John Wiley & Sons, NY (1994); Colberre-Garapin et al., J. Mol. Biol. 150:1 (1981), which are incorporated by reference herein in their entireties.

[0349] The expression levels of an antibody molecule can be increased by vector amplification (for a review, see Bebbington and Hentschel, The use of vectors based on gene amplification for the expression of cloned genes in mammalian cells in DNA cloning, Vol. 3. (Academic Press, New York, 1987)). When a marker in the vector system expressing antibody is amplifiable, increase in the level of inhibitor present in culture of host cell will increase the number of copies of the marker gene. Since the amplified region is associated with the antibody gene, production of the antibody will also increase (Crouse et al., Mol. Cell. Biol. 3:257 (1983)).

[0350] Vectors which use glutamine synthase (GS) or DHFR as the selectable markers can be amplified in the presence of the drugs methionine sulphoximine or methotrexate, respectively. An advantage of glutamine synthase based vectors are the availabilty of cell lines (e.g., the murine myeloma cell line, NS0) which are glutamine synthase negative. Glutamine synthase expression systems can also function in glutamine synthase expressing cells (e.g. Chinese Hamster Ovary (CHO) cells) by providing additional inhibitor to prevent the functioning of the endogenous gene. A glutamine synthase expression system and components thereof are detailed in PCT publications: WO87/04462; WO86/05807; WO89/01036; WO89/10404; and WO91/06657 which are incorporated in their entireties by reference herein. Additionally, glutamine synthase expression vectors that may be used according to the present invention are commercially available from suplliers, including, for example Lonza Biologics, Inc. (Portsmouth, N.H.). Expression and production of monoclonal antibodies using a GS expression system in murine myeloma cells is described in Bebbington et al., Bio/technology 10:169 (1992) and in Biblia and Robinson Biotechnol. Prog. 11:1 (1995) which are incorporated in their entirities by reference herein.

[0351] The host cell may be co-transfected with two expression vectors of the invention, the first vector encoding a heavy chain derived polypeptide and the second vector encoding a light chain derived polypeptide. The two vectors may contain identical selectable markers which enable equal expression of heavy and light chain polypeptides. Alternatively, a single vector may be used which encodes, and is capable of expressing, both heavy and light chain polypeptides. In such situations, the light chain should be placed before the heavy chain to avoid an excess of toxic free heavy chain (Proudfoot, Nature 322:52 (1986); Kohler, Proc. Natl. Acad. Sci. USA 77:2197 (1980)). The coding sequences for the heavy and light chains may comprise cDNA or genomic DNA.

[0352] Once an antibody molecule of the invention has been produced by an animal, chemically synthesized, or recombinantly expressed, it may be purified by any method known in the art for purification of an immunoglobulin molecule, for example, by chromatography (e.g., ion exchange, affinity, particularly by affinity for the specific antigen after Protein A, and sizing column chromatography), centrifugation, differential solubility, or by any other standard technique for the purification of proteins. In addition, the antibodies of the present invention or fragments thereof can be fused to heterologous polypeptide sequences described herein or otherwise known in the art, to facilitate purification.

[0353] The present invention encompasses antibodies recombinantly fused or chemically conjugated (including both covalently and non-covalently conjugations) to a polypeptide (or portion thereof, preferably at least 10, 20, 30, 40, 50, 60, 70, 80, 90 or 100 amino acids of the polypeptide) of the present invention to generate fusion proteins. The fusion does not necessarily need to be direct, but may occur through linker sequences. The antibodies may be specific for antigens other than polypeptides (or portion thereof, preferably at least 10, 20, 30, 40, 50, 60, 70, 80, 90 or 100 amino acids of the polypeptide) of the present invention. For example, antibodies may be used to target the polypeptides of the present invention to particular cell types, either in vitro or in vivo, by fusing or conjugating the polypeptides of the present invention to antibodies specific for particular cell surface receptors. Antibodies fused or conjugated to the polypeptides of the present invention may also be used in in vitro immunoassays and purification methods using methods known in the art. See e.g., Harbor et al., supra, and PCT publication WO 93/21232; EP 439,095; Naramura et al., Immunol. Lett. 39:91-99 (1994); U.S. Pat. No. 5,474,981; Gillies et al., PNAS 89:1428-1432 (1992); Fell et al., J. Immunol. 146:2446-2452 (1991), which are incorporated by reference in their entireties.

[0354] The present invention further includes compositions comprising the polypeptides of the present invention fused or conjugated to antibody domains other than the variable regions. For example, the polypeptides of the present invention may be fused or conjugated to an antibody Fc region, or portion thereof. The antibody portion fused to a polypeptide of the present invention may comprise the constant region, hinge region, CH1 domain, CH2 domain, and CH3 domain or any combination of whole domains or portions thereof. The polypeptides may also be fused or conjugated to the above antibody portions to form multimers. For example, Fc portions fused to the polypeptides of the present invention can form dimers through disulfide bonding between the Fc portions. Higher multimeric forms can be made by fusing the polypeptides to portions of IgA and IgM. Methods for fusing or conjugating the polypeptides of the present invention to antibody portions are known in the art. See, e.g., U.S. Pat. Nos. 5,336,603; 5,622,929; 5,359,046; 5,349,053; 5,447,851; 5,112,946; EP 307,434; EP 367,166; PCT publications WO 96/04388; WO 91/06570; Ashkenazi et al., Proc. Natl. Acad. Sci. USA 88:10535-10539 (1991); Zheng et al., J. Immunol. 154:5590-5600 (1995); and Vil et al., Proc. Natl. Acad. Sci. USA 89:11337-11341 (1992) (said references incorporated by reference in their entireties).

[0355] As discussed, supra, the polypeptides corresponding to a polypeptide, polypeptide fragment, or a variant of SEQ ID NO:Y may be fused or conjugated to the above antibody portions to increase the in vivo half life of the polypeptides or for use in immunoassays using methods known in the art. Further, the polypeptides corresponding to SEQ ID NO:Y may be fused or conjugated to the above antibody portions to facilitate purification. One reported example describes chimeric proteins consisting of the first two domains of the human CD4-polypeptide and various domains of the constant regions of the heavy or light chains of mammalian immunoglobulins. See EP 394,827; and Traunecker et al., Nature 331:84-86 (1988). The polypeptides of the present invention fused or conjugated to an antibody having disulfide-linked dimeric structures (due to the IgG) may also be more efficient in binding and neutralizing other molecules, than the monomeric secreted protein or protein fragment alone. See, for example, Fountoulakis et al., J. Biochem. 270:3958-3964 (1995). In many cases, the Fc part in a fusion protein is beneficial in therapy and diagnosis, and thus can result in, for example, improved pharmacokinetic properties. See, for example, EP A 232,262. Alternatively, deleting the Fc part after the fusion protein has been expressed, detected, and purified, would be desired. For example, the Fc portion may hinder therapy and diagnosis if the fusion protein is used as an antigen for immunizations. In drug discovery, for example, human proteins, such as hIL-5, have been fused with Fc portions for the purpose of high-throughput screening assays to identify antagonists of hIL-5. (See, Bennett et al., J. Molecular Recognition 8:52-58 (1995); Johanson et al., J. Biol. Chem. 270:9459-9471 (1995)).

[0356] Moreover, the antibodies or fragments thereof of the present invention can be fused to marker sequences, such as a peptide to facilitate purification. In preferred embodiments, the marker amino acid sequence is a hexa-histidine peptide, such as the tag provided in a pQE vector (QIAGEN, Inc., 9259 Eton Avenue, Chatsworth, Calif., 91311), among others, many of which are commercially available. As described in Gentz et al., Proc. Natl. Acad. Sci. USA 86:821-824 (1989), for instance, hexa-histidine provides for convenient purification of the fusion protein. Other peptide tags useful for purification include, but are not limited to, the “HA” tag, which corresponds to an epitope derived from the influenza hemagglutinin protein (Wilson et al., Cell 37:767 (1984)) and the “flag” tag.

[0357] The present invention further encompasses antibodies or fragments thereof conjugated to a diagnostic or therapeutic agent. The antibodies can be used diagnostically to, for example, monitor the development or progression of a tumor as part of a clinical testing procedure to, e.g., determine the efficacy of a given treatment regimen. Detection can be facilitated by coupling the antibody to a detectable substance. Examples of detectable substances include various enzymes, prosthetic groups, fluorescent materials, luminescent materials, bioluminescent materials, radioactive materials, positron emitting metals using various positron emission tomographies, and nonradioactive paramagnetic metal ions. The detectable substance may be coupled or conjugated either directly to the antibody (or fragment thereof) or indirectly, through an intermediate (such as, for example, a linker known in the art) using techniques known in the art. See, for example, U.S. Pat. No. 4,741,900 for metal ions which can be conjugated to antibodies for use as diagnostics according to the present invention. Examples of suitable enzymes include horseradish peroxidase, alkaline phosphatase, beta-galactosidase, or acetylcholinesterase; examples of suitable prosthetic group complexes include streptavidin/biotin and avidin/biotin; examples of suitable fluorescent materials include umbelliferone, fluorescein, fluorescein isothiocyanate, rhodamine, dichlorotriazinylamine fluorescein, dansyl chloride or phycoerythrin; an example of a luminescent material includes luminol; examples of bioluminescent materials include luciferase, luciferin, and aequorin; and examples of suitable radioactive material include 125I, 131I, 111In or 99Tc.

[0358] Further, an antibody or fragment thereof may be conjugated to a therapeutic moiety such as a cytotoxin, e.g., a cytostatic or cytocidal agent, a therapeutic agent or a radioactive metal ion, e.g., alpha-emitters such as, for example, 213Bi. A cytotoxin or cytotoxic agent includes any agent that is detrimental to cells. Examples include paclitaxol, cytochalasin B, gramicidin D, ethidium bromide, emetine, mitomycin, etoposide, tenoposide, vincristine, vinblastine, colchicin, doxorubicin, daunorubicin, dihydroxy anthracin dione, mitoxantrone, mithramycin, actinomycin D, 1-dehydrotestosterone, glucocorticoids, procaine, tetracaine, lidocaine, propranolol, and puromycin and analogs or homologs thereof. Therapeutic agents include, but are not limited to, antimetabolites (e.g., methotrexate, 6-mercaptopurine, 6-thioguanine, cytarabine, 5-fluorouracil decarbazine), alkylating agents (e.g., mechlorethamine, thioepa chlorambucil, melphalan, carmustine (BSNU) and lomustine (CCNU), cyclothosphamide, busulfan, dibromomannitol, streptozotocin, mitomycin C, and cis-dichlorodiamine platinum (II) (DDP) cisplatin), anthracyclines (e.g., daunorubicin (formerly daunomycin) and doxorubicin), antibiotics (e.g., dactinomycin (formerly actinomycin), bleomycin, mithramycin, and anthramycin (AMC)), and anti-mitotic agents (e.g., vincristine and vinblastine).

[0359] The conjugates of the invention can be used for modifying a given biological response, the therapeutic agent or drug moiety is not to be construed as limited to classical chemical therapeutic agents. For example, the drug moiety may be a protein or polypeptide possessing a desired biological activity. Such proteins may include, for example, a toxin such as abrin, ricin A, pseudomonas exotoxin, or diphtheria toxin; a protein such as tumor necrosis factor, a-interferon, β-interferon, nerve growth factor, platelet derived growth factor, tissue plasminogen activator, an apoptotic agent, e.g., TNF-alpha, TNF-beta, AIM I (See, International Publication No. WO 97/33899), AIM II (See, International Publication No. WO 97/34911), Fas Ligand (Takahashi et al., Int. Immunol., 6:1567-1574 (1994)), VEGI (See, International Publication No. WO 99/23105), a thrombotic agent or an anti-angiogenic agent, e.g., angiostatin or endostatin; or, biological response modifiers such as, for example, lymphokines, interleukin-1 (“IL-1”), interleukin-2 (“IL-2”), interleukin-6 (“IL-6”), granulocyte macrophage colony stimulating factor (“GM-CSF”), granulocyte colony stimulating factor (“G-CSF”), or other growth factors.

[0360] Antibodies may also be attached to solid supports, which are particularly useful for immunoassays or purification of the target antigen. Such solid supports include, but are not limited to, glass, cellulose, polyacrylamide, nylon, polystyrene, polyvinyl chloride or polypropylene.

[0361] Techniques for conjugating such therapeutic moiety to antibodies are well known. See, for example, Arnon et al., “Monoclonal Antibodies For Immunotargeting Of Drugs In Cancer Therapy”, in Monoclonal Antibodies And Cancer Therapy, Reisfeld et al. (eds.), pp. 243-56 (Alan R. Liss, Inc. 1985); Hellstrom et al., “Antibodies For Drug Delivery”, in Controlled Drug Delivery (2nd Ed.), Robinson et al. (eds.), pp. 623-53 (Marcel Dekker, Inc. 1987); Thorpe, “Antibody Carriers Of Cytotoxic Agents In Cancer Therapy: A Review”, in Monoclonal Antibodies '84: Biological And Clinical Applications, Pinchera et al. (eds.), pp. 475-506 (1985); “Analysis, Results, And Future Prospective Of The Therapeutic Use Of Radiolabeled Antibody In Cancer Therapy”, in Monoclonal Antibodies For Cancer Detection And Therapy, Baldwin et al. (eds.), pp. 303-16 (Academic Press 1985), and Thorpe et al., “The Preparation And Cytotoxic Properties Of Antibody-Toxin Conjugates”, Immunol. Rev. 62:119-58 (1982).

[0362] Alternatively, an antibody can be conjugated to a second antibody to form an antibody heteroconjugate as described by Segal in U.S. Pat. No. 4,676,980, which is incorporated herein by reference in its entirety.

[0363] An antibody, with or without a therapeutic moiety conjugated to it, administered alone or in combination with cytotoxic factor(s) and/or cytokine(s) can be used as a therapeutic.

[0364] Immunophenotyping

[0365] The antibodies of the invention may be utilized for immunophenotyping of cell lines and biological samples. Translation products of the gene of the present invention may be useful as cell-specific markers, or more specifically as cellular markers that are differentially expressed at various stages of differentiation and/or maturation of particular cell types. Monoclonal antibodies directed against a specific epitope, or combination of epitopes, will allow for the screening of cellular populations expressing the marker. Various techniques can be utilized using monoclonal antibodies to screen for cellular populations expressing the marker(s), and include magnetic separation using antibody-coated magnetic beads, “panning” with antibody attached to a solid matrix (i.e., plate), and flow cytometry (See, e.g., U.S. Pat. No. 5,985,660; and Morrison et al., Cell, 96:737-49 (1999)).

[0366] These techniques allow for the screening of particular populations of cells, such as might be found with hematological malignancies (i.e. minimal residual disease (MRD) in acute leukemic patients) and “non-self” cells in transplantations to prevent Graft-versus-Host Disease (GVHD). Alternatively, these techniques allow for the screening of hematopoietic stem and progenitor cells capable of undergoing proliferation and/or differentiation, as might be found in human umbilical cord blood.

[0367] Assays for Antibody Binding

[0368] The antibodies of the invention may be assayed for immunospecific binding by any method known in the art. The immunoassays which can be used include but are not limited to competitive and non-competitive assay systems using techniques such as western blots, radioimmunoassays, ELISA (enzyme linked immunosorbent assay), “sandwich” immunoassays, immunoprecipitation assays, precipitin reactions, gel diffusion precipitin reactions, immunodiffusion assays, agglutination assays, complement-fixation assays, immunoradiometric assays, fluorescent immunoassays, and protein A immunoassays, to name but a few. Such assays are routine and well known in the art (see, e.g., Ausubel et al, eds, 1994, Current Protocols in Molecular Biology, Vol. 1, John Wiley & Sons, Inc., New York, which is incorporated by reference herein in its entirety). Exemplary immunoassays are described briefly below (but are not intended by way of limitation).

[0369] Immunoprecipitation protocols generally comprise lysing a population of cells in a lysis buffer such as RIPA buffer (1% NP-40 or Triton X-100, 1% sodium deoxycholate, 0.1% SDS, 0.15 M NaCl, 0.01 M sodium phosphate at pH 7.2, 1% Trasylol) supplemented with protein phosphatase and/or protease inhibitors (e.g., EDTA, PMSF, aprotinin, sodium vanadate), adding the antibody of interest to the cell lysate, incubating for a period of time (e.g., 1-4 hours) at 4° C., adding protein A and/or protein G sepharose beads to the cell lysate, incubating for about an hour or more at 4° C., washing the beads in lysis buffer and resuspending the beads in SDS/sample buffer. The ability of the antibody of interest to immunoprecipitate a particular antigen can be assessed by, e.g., western blot analysis. One of skill in the art would be knowledgeable as to the parameters that can be modified to increase the binding of the antibody to an antigen and decrease the background (e.g., pre-clearing the cell lysate with sepharose beads). For further discussion regarding immunoprecipitation protocols see, e.g., Ausubel et al., eds., (1994), Current Protocols in Molecular Biology, Vol. 1, John Wiley & Sons, Inc., New York, section 10.16.1.

[0370] Western blot analysis generally comprises preparing protein samples, electrophoresis of the protein samples in a polyacrylamide gel (e.g., 8%-20% SDS-PAGE depending on the molecular weight of the antigen), transferring the protein sample from the polyacrylamide gel to a membrane such as nitrocellulose, PVDF or nylon, blocking the membrane in blocking solution (e.g., PBS with 3% BSA or non-fat milk), washing the membrane in washing buffer (e.g., PBS-Tween 20), blocking the membrane with primary antibody (the antibody of interest) diluted in blocking buffer, washing the membrane in washing buffer, blocking the membrane with a secondary antibody (which recognizes the primary antibody, e.g., an anti-human antibody) conjugated to an enzymatic substrate (e.g., horseradish peroxidase or alkaline phosphatase) or radioactive molecule (e.g., 32P or 125I) diluted in blocking buffer, washing the membrane in wash buffer, and detecting the presence of the antigen. One of skill in the art would be knowledgeable as to the parameters that can be modified to increase the signal detected and to reduce the background noise. For further discussion regarding western blot protocols see, e.g., Ausubel et al, eds, (1994), Current Protocols in Molecular Biology, Vol. 1, John Wiley & Sons, Inc., New York, section 10.8.1.

[0371] ELISAs comprise preparing antigen, coating the well of a 96 well microtiter plate with the antigen, adding the antibody of interest conjugated to a detectable compound such as an enzymatic substrate (e.g., horseradish peroxidase or alkaline phosphatase) to the well and incubating for a period of time, and detecting the presence of the antigen. In ELISAs the antibody of interest does not have to be conjugated to a detectable compound; instead, a second antibody (which recognizes the antibody of interest) conjugated to a detectable compound may be added to the well. Further, instead of coating the well with the antigen, the antibody may be coated to the well. In this case, a second antibody conjugated to a detectable compound may be added following the addition of the antigen of interest to the coated well. One of skill in the art would be knowledgeable as to the parameters that can be modified to increase the signal detected as well as other variations of ELISAs known in the art. For further discussion regarding ELISAs see, e.g., Ausubel et al, eds, (1994), Current Protocols in Molecular Biology, Vol. 1, John Wiley & Sons, Inc., New York, section 11.2.1.

[0372] The binding affinity of an antibody to an antigen and the off-rate of an antibody-antigen interaction can be determined by competitive binding assays. One example of a competitive binding assay is a radioimmunoassay comprising the incubation of labeled antigen (e.g., 3H or 125I) with the antibody of interest in the presence of increasing amounts of unlabeled antigen, and the detection of the antibody bound to the labeled antigen. The affinity of the antibody of interest for a particular antigen and the binding off-rates can be determined from the data by scatchard plot analysis. Competition with a second antibody can also be determined using radioimmunoassays. In this case, the antigen is incubated with antibody of interest conjugated to a labeled compound (e.g., 3H or 125I) in the presence of increasing amounts of an unlabeled second antibody.

[0373] Antibodies of the invention may be characterized using immunocytochemisty methods on cells (e.g., mammalian cells, such as CHO cells) transfected with a vector enabling the expression of an antigen or with vector alone using techniques commonly known in the art. Antibodies that bind antigen transfected cells, but not vector-only transfected cells, are antigen specific.

[0374] Therapeutic Uses

[0375] Table 1D also provides information regarding biological activities and preferred therapeutic uses (i.e. see, “Preferred Indications” column) for polynucleotides and polypeptides of the invention (including antibodies, agonists, and/or antagonists thereof). Table 1D also provides information regarding assays which may be used to test polynucleotides and polypeptides of the invention (including antibodies, agonists, and/or antagonists thereof) for the corresponding biological activities. The first column (“Gene No.”) provides the gene number in the application for each clone identifier. The second column (“cDNA ATCC Deposit No:Z”) provides the unique clone identifier for each clone as previously described and indicated in Table 1A, Table 1B, and Table 1C. The third column (“AA SEQ ID NO:Y”) indicates the Sequence Listing SEQ ID Number for polypeptide sequences encoded by the corresponding cDNA clones (also as indicated in Table 1A, Table 1B, and Table 2). The fourth column (“Biological Activity”) indicates a biological activity corresponding to the indicated polypeptides (or polynucleotides encoding said polypeptides). The fifth column (“Exemplary Activity Assay”) further describes the corresponding biological activity and also provides information pertaining to the various types of assays which may be performed to test, demonstrate, or quantify the corresponding biological activity.

[0376] The present invention is further directed to antibody-based therapies which involve administering antibodies of the invention to an animal, preferably a mammal, and most preferably a human, patient for treating one or more of the disclosed diseases, disorders, or conditions. Therapeutic compounds of the invention include, but are not limited to, antibodies of the invention (including fragments, analogs and derivatives thereof as described herein) and nucleic acids encoding antibodies of the invention (including fragments, analogs and derivatives thereof and anti-idiotypic antibodies as described herein). The antibodies of the invention can be used to detect, prevent, diagnose, prognosticate, treat, and/or ameliorate diseases, disorders or conditions associated with aberrant expression and/or activity of a polypeptide of the invention, including, but not limited to, diabetes mellitus. The treatment and/or prevention of diabetes mellitus associated with aberrant expression and/or activity of a polypeptide of the invention includes, but is not limited to, alleviating symptoms associated with diabetes mellitus. Antibodies of the invention may be provided in pharmaceutically acceptable compositions as known in the art or as described herein.

[0377] In a specific and preferred embodiment, the present invention is directed to antibody-based therapies which involve administering antibodies of the invention to an animal, preferably a mammal, and most preferably a human, patient for treating diabetes mellitus. Therapeutic compounds of the invention include, but are not limited to, antibodies of the invention (e.g., antibodies directed to the full length protein expressed on the cell surface of a mammalian cell; antibodies directed to an epitope of a polypeptide of the invention (such as, for example, a predicted linear epitope shown in Table 1B; or a conformational epitope, including fragments, analogs and derivatives thereof as described herein) and nucleic acids encoding antibodies of the invention (including fragments, analogs and derivatives thereof and anti-idiotypic antibodies as described herein). The antibodies of the invention can be used to detect, diagnose, prevent, treat, prognosticate, and/or ameliorate diabetes mellitus or conditions associated with aberrant expression and/or activity of a polypeptide of the invention. The treatment and/or prevention of diabetes mellitus or conditions associated with aberrant expression and/or activity of a polypeptide of the invention includes, but is not limited to, alleviating symptoms associated with those diseases, disorders or conditions. Antibodies of the invention may be provided in pharmaceutically acceptable compositions as known in the art or as described herein.

[0378] A summary of the ways in which the antibodies of the present invention may be used therapeutically includes binding polynucleotides or polypeptides of the present invention locally or systemically in the body or by direct cytotoxicity of the antibody, e.g. as mediated by complement (CDC) or by effector cells (ADCC). Some of these approaches are described in more detail below. Armed with the teachings provided herein, one of ordinary skill in the art will know how to use the antibodies of the present invention for diagnostic, monitoring or therapeutic purposes without undue experimentation.

[0379] The antibodies of this invention may be advantageously utilized in combination with other monoclonal or chimeric antibodies, or with lymphokines or hematopoietic growth factors (such as, e.g., IL-2, IL-3 and IL-7), for example, which serve to increase the number or activity of effector cells which interact with the antibodies.

[0380] The antibodies of the invention may be administered alone or in combination with other types of treatments (e.g., radiation therapy, chemotherapy, hormonal therapy, immunotherapy and anti-tumor agents). Generally, administration of products of a species origin or species reactivity (in the case of antibodies) that is the same species as that of the patient is preferred. Thus, in a preferred embodiment, human antibodies, fragments derivatives, analogs, or nucleic acids, are administered to a human patient for therapy or prophylaxis.

[0381] It is preferred to use high affinity and/or potent in vivo inhibiting and/or neutralizing antibodies against polypeptides or polynucleotides of the present invention, fragments or regions thereof, for both immunoassays directed to and therapy of diabetes mellitus related to polynucleotides or polypeptides, including fragments thereof, of the present invention. Such antibodies, fragments, or regions, will preferably have an affinity for polynucleotides or polypeptides of the invention, including fragments thereof. Preferred binding affinities include those with a dissociation constant or Kd less than 5×10⁻² M, 10⁻² M, 5×10⁻³ M, 10⁻³ M, 5×10⁻⁴ M, 10⁻⁴ M, 5×10⁻⁵ M, 10⁻⁵ M, 5×10⁻⁶ M, 10⁻⁶ M, 5×10⁻⁷ M, 10⁻⁷M, 5×10⁻⁸ M, 10⁻⁸ M, 5×10⁻⁹ M, 10⁻⁹ M, 5×10⁻¹⁰ M, 10⁻¹⁰ M, 5×10⁻¹¹ M, 10⁻¹¹ M, 5×10⁻¹² M, 10⁻¹² M, 5×10⁻¹³ M, 10⁻¹³ M, 5×10⁻¹⁴ M, 10⁻¹⁴ M, 5×10⁻¹⁵ M, and 10⁻¹⁵ M.

[0382] Gene Therapy

[0383] In a specific embodiment, nucleic acids comprising sequences encoding antibodies or functional derivatives thereof, are administered to treat, inhibit or prevent a diabetes mellitus associated with aberrant expression and/or activity of a polypeptide of the invention, by way of gene therapy. Gene therapy refers to therapy performed by the administration to a subject of an expressed or expressible nucleic acid. In this embodiment of the invention, the nucleic acids produce their encoded protein that mediates a therapeutic effect.

[0384] Any of the methods for gene therapy available in the art can be used according to the present invention. Exemplary methods are described below.

[0385] For general reviews of the methods of gene therapy, see Goldspiel et al., Clinical Pharmacy 12:488-505 (1993); Wu and Wu, Biotherapy 3:87-95 (1991); Tolstoshev, Ann. Rev. Pharmacol. Toxicol. 32:573-596 (1993); Mulligan, Science 260:926-932 (1993); and Morgan and Anderson, Ann. Rev. Biochem. 62:191-217 (1993); May, TIBTECH 11(5):155-215 (1993). Methods commonly known in the art of recombinant DNA technology which can be used are described in Ausubel et al. (eds.), Current Protocols in Molecular Biology, John Wiley & Sons, NY (1993); and Kriegler, Gene Transfer and Expression, A Laboratory Manual, Stockton Press, NY (1990).

[0386] In a preferred embodiment, the compound comprises nucleic acid sequences encoding an antibody, said nucleic acid sequences being part of expression vectors that express the antibody or fragments or chimeric proteins or heavy or light chains thereof in a suitable host. In particular, such nucleic acid sequences have promoters operably linked to the antibody coding region, said promoter being inducible or constitutive, and, optionally, tissue-specific. In another particular embodiment, nucleic acid molecules are used in which the antibody coding sequences and any other desired sequences are flanked by regions that promote homologous recombination at a desired site in the genome, thus providing for intrachromosomal expression of the antibody encoding nucleic acids (Koller and Smithies, Proc. Natl. Acad. Sci. USA 86:8932-8935 (1989); Zijlstra et al., Nature 342:435-438 (1989). In specific embodiments, the expressed antibody molecule is a single chain antibody; alternatively, the nucleic acid sequences include sequences encoding both the heavy and light chains, or fragments thereof, of the antibody.

[0387] Delivery of the nucleic acids into a patient may be either direct, in which case the patient is directly exposed to the nucleic acid or nucleic acid-carrying vectors, or indirect, in which case, cells are first transformed with the nucleic acids in vitro, then transplanted into the patient. These two approaches are known, respectively, as in vivo or ex vivo gene therapy.

[0388] In a specific embodiment, the nucleic acid sequences are directly administered in vivo, where it is expressed to produce the encoded product. This can be accomplished by any of numerous methods known in the art, e.g., by constructing them as part of an appropriate nucleic acid expression vector and administering it so that they become intracellular, e.g., by infection using defective or attenuated retrovirals or other viral vectors (see U.S. Pat. No. 4,980,286), or by direct injection of naked DNA, or by use of microparticle bombardment (e.g., a gene gun; Biolistic, Dupont), or coating with lipids or cell-surface receptors or transfecting agents, encapsulation in liposomes, microparticles, or microcapsules, or by administering them in linkage to a peptide which is known to enter the nucleus, by administering it in linkage to a ligand subject to receptor-mediated endocytosis (see, e.g., Wu and Wu, J. Biol. Chem. 262:4429-4432 (1987)) (which can be used to target cell types specifically expressing the receptors), etc. In another embodiment, nucleic acid-ligand complexes can be formed in which the ligand comprises a fusogenic viral peptide to disrupt endosomes, allowing the nucleic acid to avoid lysosomal degradation. In yet another embodiment, the nucleic acid can be targeted in vivo for cell specific uptake and expression, by targeting a specific receptor (see, e.g., PCT Publications WO 92/06180; WO 92/22635; WO92/20316; WO93/14188, WO 93/20221). Alternatively, the nucleic acid can be introduced intracellularly and incorporated within host cell DNA for expression, by homologous recombination (Koller and Smithies, Proc. Natl. Acad. Sci. USA 86:8932-8935 (1989); Zijlstra et al., Nature 342:435-438 (1989)).

[0389] In a specific embodiment, viral vectors that contains nucleic acid sequences encoding an antibody of the invention are used. For example, a retroviral vector can be used (see Miller et al., Meth. Enzymol. 217:581-599 (1993)). These retroviral vectors contain the components necessary for the correct packaging of the viral genome and integration into the host cell DNA. The nucleic acid sequences encoding the antibody to be used in gene therapy are cloned into one or more vectors, which facilitates delivery of the gene into a patient. More detail about retroviral vectors can be found in Boesen et al., Biotherapy 6:291-302 (1994), which describes the use of a retroviral vector to deliver the mdr1 gene to hematopoietic stem cells in order to make the stem cells more resistant to chemotherapy. Other references illustrating the use of retroviral vectors in gene therapy are: Clowes et al., J. Clin. Invest. 93:644-651 (1994); Kiem et al., Blood 83:1467-1473 (1994); Salmons and Gunzberg, Human Gene Therapy 4:129-141 (1993); and Grossman and Wilson, Curr. Opin. in Genetics and Devel. 3:110-114 (1993).

[0390] Adenoviruses are other viral vectors that can be used in gene therapy. Adenoviruses are especially attractive vehicles for delivering genes to respiratory epithelia. Adenoviruses naturally infect respiratory epithelia where they cause a mild disease. Other targets for adenovirus-based delivery systems are liver, the central nervous system, endothelial cells, and muscle. Adenoviruses have the advantage of being capable of infecting non-dividing cells. Kozarsky and Wilson, Current Opinion in Genetics and Development 3:499-503 (1993) present a review of adenovirus-based gene therapy. Bout et al., Human Gene Therapy 5:3-10 (1994) demonstrated the use of adenovirus vectors to transfer genes to the respiratory epithelia of rhesus monkeys. Other instances of the use of adenoviruses in gene therapy can be found in Rosenfeld et al., Science 252:431-434 (1991); Rosenfeld et al., Cell 68:143-155 (1992); Mastrangeli et al., J. Clin. Invest. 91:225-234 (1993); PCT Publication WO94/12649; and Wang, et al., Gene Therapy 2:775-783 (1995). In a preferred embodiment, adenovirus vectors are used.

[0391] Adeno-associated virus (AAV) has also been proposed for use in gene therapy (Walsh et al., Proc. Soc. Exp. Biol. Med. 204:289-300 (1993); U.S. Pat. No. 5,436,146).

[0392] Another approach to gene therapy involves transferring a gene to cells in tissue culture by such methods as electroporation, lipofection, calcium phosphate mediated transfection, or viral infection. Usually, the method of transfer includes the transfer of a selectable marker to the cells. The cells are then placed under selection to isolate those cells that have taken up and are expressing the transferred gene. Those cells are then delivered to a patient.

[0393] In this embodiment, the nucleic acid is introduced into a cell prior to administration in vivo of the resulting recombinant cell. Such introduction can be carried out by any method known in the art, including but not limited to transfection, electroporation, microinjection, infection with a viral or bacteriophage vector containing the nucleic acid sequences, cell fusion, chromosome-mediated gene transfer, microcell-mediated gene transfer, spheroplast fusion, etc. Numerous techniques are known in the art for the introduction of foreign genes into cells (see, e.g., Loeffler and Behr, Meth. Enzymol. 217:599-618 (1993); Cohen et al., Meth. Enzymol. 217:618-644 (1993); Cline, Pharmac. Ther. 29:69-92m (1985) and may be used in accordance with the present invention, provided that the necessary developmental and physiological functions of the recipient cells are not disrupted. The technique should provide for the stable transfer of the nucleic acid to the cell, so that the nucleic acid is expressible by the cell and preferably heritable and expressible by its cell progeny.

[0394] The resulting recombinant cells can be delivered to a patient by various methods known in the art. Recombinant blood cells (e.g., hematopoietic stem or progenitor cells) are preferably administered intravenously. The amount of cells envisioned for use depends on the desired effect, patient state, etc., and can be determined by one skilled in the art.

[0395] Cells into which a nucleic acid can be introduced for purposes of gene therapy encompass any desired, available cell type, and include but are not limited to epithelial cells, endothelial cells, keratinocytes, fibroblasts, muscle cells, hepatocytes; blood cells such as T lymphocytes, B lymphocytes, monocytes, macrophages, neutrophils, eosinophils, megakaryocytes, granulocytes; various stem or progenitor cells, in particular hematopoietic stem or progenitor cells, e.g., as obtained from bone marrow, umbilical cord blood, peripheral blood, fetal liver, etc.

[0396] In a preferred embodiment, the cell used for gene therapy is autologous to the patient.

[0397] In an embodiment in which recombinant cells are used in gene therapy, nucleic acid sequences encoding an antibody are introduced into the cells such that they are expressible by the cells or their progeny, and the recombinant cells are then administered in vivo for therapeutic effect. In a specific embodiment, stem or progenitor cells are used. Any stem and/or progenitor cells which can be isolated and maintained in vitro can potentially be used in accordance with this embodiment of the present invention (see e.g. PCT Publication WO 94/08598; Stemple and Anderson, Cell 71:973-985 (1992); Rheinwald, Meth. Cell Bio. 21A:229 (1980); and Pittelkow and Scott, Mayo Clinic Proc. 61:771 (1986)).

[0398] In a specific embodiment, the nucleic acid to be introduced for purposes of gene therapy comprises an inducible promoter operably linked to the coding region, such that expression of the nucleic acid is controllable by the presence or absence of an appropriate inducer of transcription.

[0399] Demonstration of Therapeutic or Prophylactic Activity

[0400] The compounds or pharmaceutical compositions of the invention are preferably tested in vitro, and then in vivo for the desired therapeutic or prophylactic activity, prior to use in humans. For example, in vitro assays to demonstrate the therapeutic or prophylactic utility of a compound or pharmaceutical composition include, the effect of a compound on a cell line or a patient tissue sample. The effect of the compound or composition on the cell line and/or tissue sample can be determined utilizing techniques known to those of skill in the art including, but not limited to, rosette formation assays and cell lysis assays. In accordance with the invention, in vitro assays which can be used to determine whether administration of a specific compound is indicated, include in vitro cell culture assays in which a patient tissue sample is grown in culture, and exposed to or otherwise administered a compound, and the effect of such compound upon the tissue sample is observed.

[0401] Therapeutic/Prophylactic Administration and Composition

[0402] The invention provides methods of treatment, inhibition and prophylaxis by administration to a subject of an effective amount of a compound or pharmaceutical composition of the invention, preferably a polypeptide or antibody of the invention. In a preferred embodiment, the compound is substantially purified (e.g., substantially free from substances that limit its effect or produce undesired side-effects). The subject is preferably an animal, including but not limited to animals such as cows, pigs, horses, chickens, cats, dogs, etc., and is preferably a mammal, and most preferably human.

[0403] Formulations and methods of administration that can be employed when the compound comprises a nucleic acid or an immunoglobulin are described above; additional appropriate formulations and routes of administration can be selected from among those described herein below.

[0404] Various delivery systems are known and can be used to administer a compound of the invention, e.g., encapsulation in liposomes, microparticles, microcapsules; recombinant cells capable of expressing the compound, receptor-mediated endocytosis (see, e.g., Wu and Wu, J. Biol. Chem. 262:4429-4432 (1987)), construction of a nucleic acid as part of a retroviral or other vector, etc. Methods of introduction include but are not limited to intradermal, intramuscular, intraperitoneal, intravenous, subcutaneous, intranasal, epidural, and oral routes. The compounds or compositions may be administered by any convenient route, for example by infusion or bolus injection, by absorption through epithelial or mucocutaneous linings (e.g., oral mucosa, rectal and intestinal mucosa, etc.) and may be administered together with other biologically active agents. Administration can be systemic or local. In addition, it may be desirable to introduce the pharmaceutical compounds or compositions of the invention into the central nervous system by any suitable route, including intraventricular and intrathecal injection; intraventricular injection may be facilitated by an intraventricular catheter, for example, attached to a reservoir, such as an Ommaya reservoir. Pulmonary administration can also be employed, e.g., by use of an inhaler or nebulizer, and formulation with an aerosolizing agent.

[0405] In a specific embodiment, it may be desirable to administer the pharmaceutical compounds or compositions of the invention locally to the area in need of treatment; this may be achieved by, for example, and not by way of limitation, local infusion during surgery, topical application, e.g., in conjunction with a wound dressing after surgery, by injection, by means of a catheter, by means of a suppository, or by means of an implant, said implant being of a porous, non-porous, or gelatinous material, including membranes, such as sialastic membranes, or fibers. Preferably, when administering a protein, including an antibody, of the invention, care must be taken to use materials to which the protein does not absorb.

[0406] In another embodiment, the compound or composition can be delivered in a vesicle, in particular a liposome (see Langer, Science 249:1527-1533 (1990); Treat et al., in Liposomes in the Therapy of Infectious Disease and Cancer, Lopez-Berestein and Fidler (eds.), Liss, New York, pp. 353-365 (1989); Lopez-Berestein, ibid., pp. 317-327; see generally ibid.) In yet another embodiment, the compound or composition can be delivered in a controlled release system. In one embodiment, a pump may be used (see Langer, supra; Sefton, CRC Crit. Ref. Biomed. Eng. 14:201 (1987); Buchwald et al., Surgery 88:507 (1980); Saudek et al., N. Engl. J. Med. 321:574 (1989)). In another embodiment, polymeric materials can be used (see Medical Applications of Controlled Release, Langer and Wise (eds.), CRC Pres., Boca Raton, Fla. (1974); Controlled Drug Bioavailability, Drug Product Design and Performance, Smolen and Ball (eds.), Wiley, New York (1984); Ranger and Peppas, J., Macromol. Sci. Rev. Macromol. Chem. 23:61 (1983); see also Levy et al., Science 228:190 (1985); During et al., Ann. Neurol. 25:351 (1989); Howard et al., J. Neurosurg. 71:105 (1989)). In yet another embodiment, a controlled release system can be placed in proximity of the therapeutic target, e.g., the brain, thus requiring only a fraction of the systemic dose (see, e.g., Goodson, in Medical Applications of Controlled Release, supra, vol. 2, pp. 115-138 (1984)).

[0407] Other controlled release systems are discussed in the review by Langer (Science 249:1527-1533 (1990)).

[0408] In a specific embodiment where the compound of the invention is a nucleic acid encoding a protein, the nucleic acid can be administered in vivo to promote expression of its encoded protein, by constructing it as part of an appropriate nucleic acid expression vector and administering it so that it becomes intracellular, e.g., by use of a retroviral vector (see U.S. Pat. No. 4,980,286), or by direct injection, or by use of microparticle bombardment (e.g., a gene gun; Biolistic, Dupont), or coating with lipids or cell-surface receptors or transfecting agents, or by administering it in linkage to a homeobox-like peptide which is known to enter the nucleus (see e.g., Joliot et al., Proc. Natl. Acad. Sci. USA 88:1864-1868 (1991)), etc. Alternatively, a nucleic acid can be introduced intracellularly and incorporated within host cell DNA for expression, by homologous recombination.

[0409] The present invention also provides pharmaceutical compositions. Such compositions comprise a therapeutically effective amount of a compound, and a pharmaceutically acceptable carrier. In a specific embodiment, the term “pharmaceutically acceptable” means approved by a regulatory agency of the Federal or a state government or listed in the U.S. Pharmacopeia or other generally recognized pharmacopeia for use in animals, and more particularly in humans. The term “carrier” refers to a diluent, adjuvant, excipient, or vehicle with which the therapeutic is administered. Such pharmaceutical carriers can be sterile liquids, such as water and oils, including those of petroleum, animal, vegetable or synthetic origin, such as peanut oil, soybean oil, mineral oil, sesame oil and the like. Water is a preferred carrier when the pharmaceutical composition is administered intravenously. Saline solutions and aqueous dextrose and glycerol solutions can also be employed as liquid carriers, particularly for injectable solutions. Suitable pharmaceutical excipients include starch, glucose, lactose, sucrose, gelatin, malt, rice, flour, chalk, silica gel, sodium stearate, glycerol monostearate, talc, sodium chloride, dried skim milk, glycerol, propylene, glycol, water, ethanol and the like. The composition, if desired, can also contain minor amounts of wetting or emulsifying agents, or pH buffering agents. These compositions can take the form of solutions, suspensions, emulsion, tablets, pills, capsules, powders, sustained-release formulations and the like. The composition can be formulated as a suppository, with traditional binders and carriers such as triglycerides. Oral formulation can include standard carriers such as pharmaceutical grades of mannitol, lactose, starch, magnesium stearate, sodium saccharine, cellulose, magnesium carbonate, etc. Examples of suitable pharmaceutical carriers are described in “Remington's Pharmaceutical Sciences” by E. W. Martin. Such compositions will contain a therapeutically effective amount of the compound, preferably in purified form, together with a suitable amount of carrier so as to provide the form for proper administration to the patient. The formulation should suit the mode of administration.

[0410] In a preferred embodiment, the composition is formulated in accordance with routine procedures as a pharmaceutical composition adapted for intravenous administration to human beings. Typically, compositions for intravenous administration are solutions in sterile isotonic aqueous buffer. Where necessary, the composition may also include a solubilizing agent and a local anesthetic such as lignocaine to ease pain at the site of the injection. Generally, the ingredients are supplied either separately or mixed together in unit dosage form, for example, as a dry lyophilized powder or water free concentrate in a hermetically sealed container such as an ampoule or sachette indicating the quantity of active agent. Where the composition is to be administered by infusion, it can be dispensed with an infusion bottle containing sterile pharmaceutical grade water or saline. Where the composition is administered by injection, an ampoule of sterile water for injection or saline can be provided so that the ingredients may be mixed prior to administration.

[0411] The compounds of the invention can be formulated as neutral or salt forms. Pharmaceutically acceptable salts include those formed with anions such as those derived from hydrochloric, phosphoric, acetic, oxalic, tartaric acids, etc., and those formed with cations such as those derived from sodium, potassium, ammonium, calcium, ferric hydroxides, isopropylamine, triethylamine, 2-ethylamino ethanol, histidine, procaine, etc.

[0412] The amount of the compound of the invention which will be effective in the treatment, inhibition and prevention of a disease or disorder associated with aberrant expression and/or activity of a polypeptide of the invention can be determined by standard clinical techniques. In addition, in vitro assays may optionally be employed to help identify optimal dosage ranges. The precise dose to be employed in the formulation will also depend on the route of administration, and the seriousness of the disease or disorder, and should be decided according to the judgment of the practitioner and each patient's circumstances. Effective doses may be extrapolated from dose-response curves derived from in vitro or animal model test systems.

[0413] For antibodies, the dosage administered to a patient is typically 0.1 mg/kg to 100 mg/kg of the patient's body weight. Preferably, the dosage administered to a patient is between 0.1 mg/kg and 20 mg/kg of the patient's body weight, more preferably 1 mg/kg to 10 mg/kg of the patient's body weight. Generally, human antibodies have a longer half-life within the human body than antibodies from other species due to the immune response to the foreign polypeptides. Thus, lower dosages of human antibodies and less frequent administration is often possible. Further, the dosage and frequency of administration of antibodies of the invention may be reduced by enhancing uptake and tissue penetration (e.g., into the brain) of the antibodies by modifications such as, for example, lipidation.

[0414] The invention also provides a pharmaceutical pack or kit comprising one or more containers filled with one or more of the ingredients of the pharmaceutical compositions of the invention. Optionally associated with such container(s) can be a notice in the form prescribed by a governmental agency regulating the manufacture, use or sale of pharmaceuticals or biological products, which notice reflects approval by the agency of manufacture, use or sale for human administration.

[0415] Diagnosis and Imaging

[0416] Labeled antibodies, and derivatives and analogs thereof, which specifically bind to a polypeptide of interest can be used for diagnostic purposes to detect, diagnose, prognosticate, or monitor diabetes mellitus and/or conditions associated with the aberrant expression and/or activity of a polypeptide of the invention. The invention provides for the detection of aberrant expression of a polypeptide of interest, comprising (a) assaying the expression of the polypeptide of interest in cells or body fluid of an individual using one or more antibodies specific to the polypeptide interest and (b) comparing the level of gene expression with a standard gene expression level, whereby an increase or decrease in the assayed polypeptide gene expression level compared to the standard expression level is indicative of aberrant expression.

[0417] The invention provides a diagnostic assay for diagnosing diabetes mellitus, comprising (a) assaying the expression of the polypeptide of interest in cells or body fluid of an individual using one or more antibodies specific to the polypeptide interest and (b) comparing the level of gene expression with a standard gene expression level, whereby an increase or decrease in the assayed polypeptide gene expression level compared to the standard expression level is indicative of diabetes mellitus. With respect to insulin resistance, the presence of a relatively high or low amount of transcript in biopsied tissue from an individual may indicate a predisposition for the development of the disease, or may provide a means for detecting the disease prior to the appearance of actual clinical symptoms. A more definitive diagnosis of this type may allow health professionals to employ preventative measures or aggressive treatment earlier thereby preventing the development or further progression of insulin resistance into diabetes mellitus.

[0418] Antibodies of the invention can be used to assay protein levels in a biological sample using classical immunohistological methods known to those of skill in the art (e.g., see Jalkanen et al., J. Cell. Biol. 101:976-985 (1985); Jalkanen et al., J. Cell. Biol. 105:3087-3096 (1987)). Other antibody-based methods useful for detecting protein gene expression include immunoassays, such as the enzyme linked immunosorbent assay (ELISA) and the radioimmunoassay (RIA). Suitable antibody assay labels are known in the art and include enzyme labels, such as, glucose oxidase; radioisotopes, such as iodine (125I, 121I), carbon (14C), sulfur (35S), tritium (3H), indium (112In), and technetium (99Tc); luminescent labels, such as luminol; and fluorescent labels, such as fluorescein and rhodamine, and biotin.

[0419] One facet of the invention is the detection and diagnosis of a disease or disorder associated with aberrant expression of a polypeptide of interest in an animal, preferably a mammal and most preferably a human. In one embodiment, diagnosis comprises: a) administering (for example, parenterally, subcutaneously, or intraperitoneally) to a subject an effective amount of a labeled molecule which specifically binds to the polypeptide of interest; b) waiting for a time interval following the administering for permitting the labeled molecule to preferentially concentrate at sites in the subject where the polypeptide is expressed (and for unbound labeled molecule to be cleared to background level); c) determining background level; and d) detecting the labeled molecule in the subject, such that detection of labeled molecule above the background level indicates that the subject has a particular disease or disorder associated with aberrant expression of the polypeptide of interest. Background level can be determined by various methods including, comparing the amount of labeled molecule detected to a standard value previously determined for a particular system.

[0420] It will be understood in the art that the size of the subject and the imaging system used will determine the quantity of imaging moiety needed to produce diagnostic images. In the case of a radioisotope moiety, for a human subject, the quantity of radioactivity injected will normally range from about 5 to 20 millicuries of 99mTc. The labeled antibody or antibody fragment will then preferentially accumulate at the location of cells which contain the specific protein. In vivo tumor imaging is described in S. W. Burchiel et al., “Immunopharmacokinetics of Radiolabeled Antibodies and Their Fragments.” (Chapter 13 in Tumor Imaging: The Radiochemical Detection of Cancer, S. W. Burchiel and B. A. Rhodes, eds., Masson Publishing Inc. (1982)).

[0421] Depending on several variables, including the type of label used and the mode of administration, the time interval following the administration for permitting the labeled molecule to preferentially concentrate at sites in the subject and for unbound labeled molecule to be cleared to background level is 6 to 48 hours or 6 to 24 hours or 6 to 12 hours. In another embodiment the time interval following administration is 5 to 20 days or 5 to 10 days.

[0422] In an embodiment, monitoring of the disease or disorder is carried out by repeating the method for diagnosing the disease or disease, for example, one month after initial diagnosis, six months after initial diagnosis, one year after initial diagnosis, etc.

[0423] Presence of the labeled molecule can be detected in the patient using methods known in the art for in vivo scanning. These methods depend upon the type of label used. Skilled artisans will be able to determine the appropriate method for detecting a particular label. Methods and devices that may be used in the diagnostic methods of the invention include, but are not limited to, computed tomography (CT), whole body scan such as position emission tomography (PET), magnetic resonance imaging (MRI), and sonography.

[0424] In a specific embodiment, the molecule is labeled with a radioisotope and is detected in the patient using a radiation responsive surgical instrument (Thurston et al., U.S. Pat. No. 5,441,050). In another embodiment, the molecule is labeled with a fluorescent compound and is detected in the patient using a fluorescence responsive scanning instrument. In another embodiment, the molecule is labeled with a positron emitting metal and is detected in the patent using positron emission-tomography. In yet another embodiment, the molecule is labeled with a paramagnetic label and is detected in a patient using magnetic resonance imaging (MRI).

[0425] Kits

[0426] The present invention provides kits that can be used in the above methods. In one embodiment, a kit comprises an antibody of the invention, preferably a purified antibody, in one or more containers. In a specific embodiment, the kits of the present invention contain a substantially isolated polypeptide comprising an epitope which is specifically immunoreactive with an antibody included in the kit. Preferably, the kits of the present invention further comprise a control antibody which does not react with the polypeptide of interest. In another specific embodiment, the kits of the present invention contain a means for detecting the binding of an antibody to a polypeptide of interest (e.g., the antibody may be conjugated to a detectable substrate such as a fluorescent compound, an enzymatic substrate, a radioactive compound or a luminescent compound, or a second antibody which recognizes the first antibody may be conjugated to a detectable substrate).

[0427] In another specific embodiment of the present invention, the kit is a diagnostic kit for use in screening serum containing antibodies specific against proliferative and/or cancerous polynucleotides and polypeptides. Such a kit may include a control antibody that does not react with the polypeptide of interest. Such a kit may include a substantially isolated polypeptide antigen comprising an epitope which is specifically immunoreactive with at least one anti-polypeptide antigen antibody. Further, such a kit includes means for detecting the binding of said antibody to the antigen (e.g., the antibody may be conjugated to a fluorescent compound such as fluorescein or rhodamine which can be detected by flow cytometry). In specific embodiments, the kit may include a recombinantly produced or chemically synthesized polypeptide antigen. The polypeptide antigen of the kit may also be attached to a solid support.

[0428] In a more specific embodiment the detecting means of the above-described kit includes a solid support to which said polypeptide antigen is attached. Such a kit may also include a non-attached reporter-labeled anti-human antibody. In this embodiment, binding of the antibody to the polypeptide antigen can be detected by binding of the said reporter-labeled antibody.

[0429] In an additional embodiment, the invention includes a diagnostic kit for use in screening serum containing antigens of the polypeptide of the invention. The diagnostic kit includes a substantially isolated antibody specifically immunoreactive with polypeptide or polynucleotide antigens, and means for detecting the binding of the polynucleotide or polypeptide antigen to the antibody. In one embodiment, the antibody is attached to a solid support. In a specific embodiment, the antibody may be a monoclonal antibody. The detecting means of the kit may include a second, labeled monoclonal antibody. Alternatively, or in addition, the detecting means may include a labeled, competing antigen.

[0430] In one diagnostic configuration, test serum is reacted with a solid phase reagent having a surface-bound antigen obtained by the methods of the present invention. After binding with specific antigen antibody to the reagent and removing unbound serum components by washing, the reagent is reacted with reporter-labeled anti-human antibody to bind reporter to the reagent in proportion to the amount of bound anti-antigen antibody on the solid support. The reagent is again washed to remove unbound labeled antibody, and the amount of reporter associated with the reagent is determined. Typically, the reporter is an enzyme which is detected by incubating the solid phase in the presence of a suitable fluorometric, luminescent or calorimetric substrate (Sigma, St. Louis, Mo.).

[0431] The solid surface reagent in the above assay is prepared by known techniques for attaching protein material to solid support material, such as polymeric beads, dip sticks, 96-well plate or filter material. These attachment methods generally include non-specific adsorption of the protein to the support or covalent attachment of the protein, typically through a free amine group, to a chemically reactive group on the solid support, such as an activated carboxyl, hydroxyl, or aldehyde group. Alternatively, streptavidin coated plates can be used in conjunction with biotinylated antigen(s).

[0432] Thus, the invention provides an assay system or kit for carrying out this diagnostic method. The kit generally includes a support with surface-bound recombinant antigens, and a reporter-labeled anti-human antibody for detecting surface-bound anti-antigen antibody.

[0433] Uses of the Polynucleotides

[0434] Each of the polynucleotides identified herein can be used in numerous ways as reagents. The following description should be considered exemplary and utilizes known techniques.

[0435] The polynucleotides of the present invention are useful for chromosome identification. There exists an ongoing need to identify new chromosome markers, since few chromosome marking reagents, based on actual sequence data (repeat polymorphisms), are presently available. Each sequence is specifically targeted to and can hybridize with a particular location on an individual human chromosome, thus each polynucleotide of the present invention can routinely be used as a chromosome marker using techniques known in the art. Table 1B.1, column 8 provides the chromosome location of some of the polynucleotides of the invention.

[0436] Briefly, sequences can be mapped to chromosomes by preparing PCR primers (preferably at least 15 bp (e.g., 15-25 bp) from the sequences shown in SEQ ID NO:X. Primers can optionally be selected using computer analysis so that primers do not span more than one predicted exon in the genomic DNA. These primers are then used for PCR screening of somatic cell hybrids containing individual human chromosomes. Only those hybrids containing the human gene corresponding to SEQ ID NO:X will yield an amplified fragment.

[0437] Similarly, somatic hybrids provide a rapid method of PCR mapping the polynucleotides to particular chromosomes. Three or more clones can be assigned per day using a single thermal cycler. Moreover, sublocalization of the polynucleotides can be achieved with panels of specific chromosome fragments. Other gene mapping strategies that can be used include in situ hybridization, prescreening with labeled flow-sorted chromosomes, preselection by hybridization to construct chromosome specific-cDNA libraries, and computer mapping techniques (See, e.g., Shuler, Trends Biotechnol 16:456-459 (1998) which is hereby incorporated by reference in its entirety).

[0438] Precise chromosomal location of the polynucleotides can also be achieved using fluorescence in situ hybridization (FISH) of a metaphase chromosomal spread. This technique uses polynucleotides as short as 500 or 600 bases; however, polynucleotides 2,000 bp are preferred. For a review of this technique, see Verma et al., “Human Chromosomes: a Manual of Basic Techniques,” Pergamon Press, New York (1988).

[0439] For chromosome mapping, the polynucleotides can be used individually (to mark a single chromosome or a single site on that chromosome) or in panels (for marking multiple sites and/or multiple chromosomes).

[0440] Thus, the present invention also provides a method for chromosomal localization which involves (a) preparing PCR primers from the polynucleotide sequences in Table 1B and/or Table 2 and SEQ ID NO:X and (b) screening somatic cell hybrids containing individual chromosomes.

[0441] The polynucleotides of the present invention would likewise be useful for radiation hybrid mapping, HAPPY mapping, and long range restriction mapping. For a review of these techniques and others known in the art, see, e.g. Dear, “Genome Mapping: A Practical Approach,” IRL Press at Oxford University Press, London (1997); Aydin, J. Mol. Med. 77:691-694 (1999); Hacia et al., Mol. Psychiatry 3:483-492 (1998); Herrick et al., Chromosome Res. 7:409-423 (1999); Hamilton et al., Methods Cell Biol. 62:265-280 (2000); and/or Ott, J. Hered. 90:68-70 (1999) each of which is hereby incorporated by reference in its entirety.

[0442] Once a polynucleotide has been mapped to a precise chromosomal location, the physical position of the polynucleotide can be used in linkage analysis. Linkage analysis establishes coinheritance between a chromosomal location and presentation of a particular disease. (Disease mapping data are found, for example, in V. McKusick, Mendelian Inheritance in Man (available on line through Johns Hopkins University Welch Medical Library)). Column 9 of Table 1B.1 provides an OMIM reference identification number of diseases associated with the cytologic band disclosed in column 8 of Table 1B.1, as determined using techniques described herein and by reference to Table 5. Assuming 1 megabase mapping resolution and one gene per 20 kb, a cDNA precisely localized to a chromosomal region associated with the disease could be one of 50-500 potential causative genes.

[0443] Thus, once coinheritance is established, differences in a polynucleotide of the invention and the corresponding gene between affected and unaffected individuals can be examined. First, visible structural alterations in the chromosomes, such as deletions or translocations, are examined in chromosome spreads or by PCR. If no structural alterations exist, the presence of point mutations are ascertained. Mutations observed in some or all affected individuals, but not in normal individuals, indicates that the mutation may cause the disease. However, complete sequencing of the polypeptide and the corresponding gene from several normal individuals is required to distinguish the mutation from a polymorphism. If a new polymorphism is identified, this polymorphic polypeptide can be used for further linkage analysis.

[0444] Furthermore, increased or decreased expression of the gene in affected individuals as compared to unaffected individuals can be assessed using the polynucleotides of the invention. Any of these alterations (altered expression, chromosomal rearrangement, or mutation) can be used as a diagnostic or prognostic marker. Diagnostic and prognostic methods, kits and reagents encompassed by the present invention are briefly described below and more thoroughly elsewhere herein (see e.g., the sections labeled “Antibodies”, “Diagnostic Assays”, and “Methods for Detecting Diseases”).

[0445] Thus, the invention also provides a diagnostic method useful during diagnosis of a disorder, involving measuring the expression level of polynucleotides of the present invention in cells or body fluid from an individual and comparing the measured gene expression level with a standard level of polynucleotide expression level, whereby an increase or decrease in the gene expression level compared to the standard is indicative of a disorder. Additional non-limiting examples of diagnostic methods encompassed by the present invention are more thoroughly described elsewhere herein (see, e.g., Example 12).

[0446] In still another embodiment, the invention includes a kit for analyzing samples for the presence of proliferative and/or cancerous polynucleotides derived from a test subject. In a general embodiment, the kit includes at least one polynucleotide probe containing a nucleotide sequence that will specifically hybridize with a polynucleotide of the invention and a suitable container. In a specific embodiment, the kit includes two polynucleotide probes defining an internal region of the polynucleotide of the invention, where each probe has one strand containing a 31′mer-end internal to the region. In a further embodiment, the probes may be useful as primers for polymerase chain reaction amplification.

[0447] Where a diagnosis of a related disorder, including, for example, diagnosis of a tumor, has already been made according to conventional methods, the present invention is useful as a prognostic indicator, whereby patients exhibiting enhanced or depressed polynucleotide of the invention expression will experience a worse clinical outcome relative to patients expressing the gene at a level nearer the standard level.

[0448] By “measuring the expression level of polynucleotides of the invention” is intended qualitatively or quantitatively measuring or estimating the level of the polypeptide of the invention or the level of the mRNA encoding the polypeptide of the invention in a first biological sample either directly (e.g., by determining or estimating absolute protein level or mRNA level) or relatively (e.g., by comparing to the polypeptide level or mRNA level in a second biological sample). Preferably, the polypeptide level or mRNA level in the first biological sample is measured or estimated and compared to a standard polypeptide level or mRNA level, the standard being taken from a second biological sample obtained from an individual not having the related disorder or being determined by averaging levels from a population of individuals not having a related disorder. As will be appreciated in the art, once a standard polypeptide level or mRNA level is known, it can be used repeatedly as a standard for comparison.

[0449] By “biological sample” is intended any biological sample obtained from an individual, body fluid, cell line, tissue culture, or other source which contains polypeptide of the present invention or the corresponding mRNA. As indicated, biological samples include body fluids (such as semen, lymph, vaginal pool, sera, plasma, urine, synovial fluid and spinal fluid) which contain the polypeptide of the present invention, and tissue sources found to express the polypeptide of the present invention. Methods for obtaining tissue biopsies and body fluids from mammals are well known in the art. Where the biological sample is to include mRNA, a tissue biopsy is the preferred source.

[0450] The method(s) provided above may preferably be applied in a diagnostic method and/or kits in which polynucleotides and/or polypeptides of the invention are attached to a solid support. In one exemplary method, the support may be a “gene chip” or a “biological chip” as described in U.S. Pat. Nos. 5,837,832, 5,874,219, and 5,856,174. Further, such a gene chip with polynucleotides of the invention attached may be used to identify polymorphisms between the isolated polynucleotide sequences of the invention, with polynucleotides isolated from a test subject. The knowledge of such polymorphisms (i.e. their location, as well as, their existence) would be beneficial in identifying disease loci for many disorders, such as for example, in neural disorders, immune system disorders, muscular disorders, reproductive disorders, gastrointestinal disorders, pulmonary disorders, digestive disorders, metabolic disorders, cardiovascular disorders, renal disorders, proliferative disorders, and/or cancerous diseases and conditions. Such a method is described in U.S. Pat. Nos. 5,858,659 and 5,856,104. The US Patents referenced supra are hereby incorporated by reference in their entirety herein.

[0451] The present invention encompasses polynucleotides of the present invention that are chemically synthesized, or reproduced as peptide nucleic acids (PNA), or according to other methods known in the art. The use of PNAs would serve as the preferred form if the polynucleotides of the invention are incorporated onto a solid support, or gene chip. For the purposes of the present invention, a peptide nucleic acid (PNA) is a polyamide type of DNA analog and the monomeric units for adenine, guanine, thymine and cytosine are available commercially (Perceptive Biosystems). Certain components of DNA, such as phosphorus, phosphorus oxides, or deoxyribose derivatives, are not present in PNAs. As disclosed by Nielsen et al., Science 254, 1497 (1991); and Egholm et al., Nature 365, 666 (1993), PNAs bind specifically and tightly to complementary DNA strands and are not degraded by nucleases. In fact, PNA binds more strongly to DNA than DNA itself does. This is probably because there is no electrostatic repulsion between the two strands, and also the polyamide backbone is more flexible. Because of this, PNA/DNA duplexes bind under a wider range of stringency conditions than DNA/DNA duplexes, making it easier to perform multiplex hybridization. Smaller probes can be used than with DNA due to the strong binding. In addition, it is more likely that single base mismatches can be determined with PNA/DNA hybridization because a single mismatch in a PNA/DNA 15-mer lowers the melting point (T.sub.m) by 8°-20° C., vs. 4°-16° C. for the DNA/DNA 15-mer duplex. Also, the absence of charge groups in PNA means that hybridization can be done at low ionic strengths and reduce possible interference by salt during the analysis.

[0452] The compounds of the present invention have uses which include, but are not limited to, detecting cancer in mammals. In particular the invention is useful during diagnosis of pathological cell proliferative neoplasias which include, but are not limited to: acute myelogenous leukemias including acute monocytic leukemia, acute myeloblastic leukemia, acute promyelocytic leukemia, acute myelomonocytic leukemia, acute erythroleukemia, acute megakaryocytic leukemia, and acute undifferentiated leukemia, etc.; and chronic myelogenous leukemias including chronic myelomonocytic leukemia, chronic granulocytic leukemia, etc. Preferred mammals include monkeys, apes, cats, dogs, cows, pigs, horses, rabbits and humans. Particularly preferred are humans.

[0453] Pathological cell proliferative disorders are often associated with inappropriate activation of proto-oncogenes. (Gelmann, E. P. et al., “The Etiology of Acute Leukemia: Molecular Genetics and Viral Oncology,” in Neoplastic Diseases of the Blood, Vol 1., Wiernik, P. H. et al. eds., 161-182 (1985)). Neoplasias are now believed to result from the qualitative alteration of a normal cellular gene product, or from the quantitative modification of gene expression by insertion into the chromosome of a viral sequence, by chromosomal translocation of a gene to a more actively transcribed region, or by some other mechanism. (Gelmann et al., supra) It is likely that mutated or altered expression of specific genes is involved in the pathogenesis of some leukemias, among other tissues and cell types. (Gelmann et al., supra) Indeed, the human counterparts of the oncogenes involved in some animal neoplasias have been amplified or translocated in some cases of human leukemia and carcinoma. (Gelmann et al., supra) For example, c-myc expression is highly amplified in the non-lymphocytic leukemia cell line HL-60. When HL-60 cells are chemically induced to stop proliferation, the level of c-myc is found to be downregulated. (International Publication Number WO 91/15580). However, it has been shown that exposure of HL-60 cells to a DNA construct that is complementary to the 5′ end of c-myc or c-myb blocks translation of the corresponding mRNAs which down-regulates expression of the c-myc or c-myb proteins and causes arrest of cell proliferation and differentiation of the treated cells. (International Publication Number WO 91/15580; Wickstrom et al., Proc. Natl. Acad. Sci. 85:1028 (1988); Anfossi et al., Proc. Natl. Acad. Sci. 86:3379 (1989)). However, the skilled artisan would appreciate the present invention's usefulness is not be limited to treatment, prevention, and/or prognosis of proliferative disorders of cells and tissues of hematopoietic origin, in light of the numerous cells and cell types of varying origins which are known to exhibit proliferative phenotypes.

[0454] In addition to the foregoing, a polynucleotide of the present invention can be used to control gene expression through triple helix formation or through antisense DNA or RNA. Antisense techniques are discussed, for example, in Okano, J. Neurochem. 56: 560 (1991); “Oligodeoxynucleotides as Antisense Inhibitors of Gene Expression, CRC Press, Boca Raton, Fla. (1988). Triple helix formation is discussed in, for instance Lee et al., Nucleic Acids Research 6: 3073 (1979); Cooney et al., Science 241: 456 (1988); and Dervan et al., Science 251: 1360 (1991). Both methods rely on binding of the polynucleotide to a complementary DNA or RNA. For these techniques, preferred polynucleotides are usually oligonucleotides 20 to 40 bases in length and complementary to either the region of the gene involved in transcription (triple helix—see Lee et al., Nucl. Acids Res. 6:3073 (1979); Cooney et al., Science 241:456 (1988); and Dervan et al., Science 251:1360 (1991)) or to the mRNA itself (antisense—Okano, J. Neurochem. 56:560 (1991); Oligodeoxy-nucleotides as Antisense Inhibitors of Gene Expression, CRC Press, Boca Raton, Fla. (1988)). Triple helix formation optimally results in a shut-off of RNA transcription from DNA, while antisense RNA hybridization blocks translation of an mRNA molecule into polypeptide. The oligonucleotide described above can also be delivered to cells such that the antisense RNA or DNA may be expressed in vivo to inhibit production of polypeptide of the present invention antigens. Both techniques are effective in model systems, and the information disclosed herein can be used to design antisense or triple helix polynucleotides in an effort to treat disease, and in particular, for the treatment of proliferative diseases and/or conditions. Non-limiting antisense and triple helix methods encompassed by the present invention are more thoroughly described elsewhere herein (see, e.g., the section labeled “Antisense and Ribozyme (Antagonists)”).

[0455] Polynucleotides of the present invention are also useful in gene therapy. One goal of gene therapy is to insert a normal gene into an organism having a defective gene, in an effort to correct the genetic defect. The polynucleotides disclosed in the present invention offer a means of targeting such genetic defects in a highly accurate manner. Another goal is to insert a new gene that was not present in the host genome, thereby producing a new trait in the host cell. Additional non-limiting examples of gene therapy methods encompassed by the present invention are more thoroughly described elsewhere herein (see, e.g., the sections labeled “Gene Therapy Methods”, and Examples 16, 17 and 18).

[0456] The polynucleotides are also useful for identifying individuals from minute biological samples. The United States military, for example, is considering the use of restriction fragment length polymorphism (RFLP) for identification of its personnel. In this technique, an individual's genomic DNA is digested with one or more restriction enzymes, and probed on a Southern blot to yield unique bands for identifying personnel. This method does not suffer from the current limitations of “Dog Tags” which can be lost, switched, or stolen, making positive identification difficult. The polynucleotides of the present invention can be used as additional DNA markers for RFLP.

[0457] The polynucleotides of the present invention can also be used as an alternative to RFLP, by determining the actual base-by-base DNA sequence of selected portions of an individual's genome. These sequences can be used to prepare PCR primers for amplifying and isolating such selected DNA, which can then be sequenced. Using this technique, individuals can be identified because each individual will have a unique set of DNA sequences. Once an unique ID database is established for an individual, positive identification of that individual, living or dead, can be made from extremely small tissue samples.

[0458] Forensic biology also benefits from using DNA-based identification techniques as disclosed herein. DNA sequences taken from very small biological samples such as tissues, e.g., hair or skin, or body fluids, e.g., blood, saliva, semen, synovial fluid, amniotic fluid, breast milk, lymph, pulmonary sputum or surfactant, urine, fecal matter, etc., can be amplified using PCR. In one prior art technique, gene sequences amplified from polymorphic loci, such as DQa class II HLA gene, are used in forensic biology to identify individuals. (Erlich, H., PCR Technology, Freeman and Co. (1992)). Once these specific polymorphic loci are amplified, they are digested with one or more restriction enzymes, yielding an identifying set of bands on a Southern blot probed with DNA corresponding to the DQa class II HLA gene. Similarly, polynucleotides of the present invention can be used as polymorphic markers for forensic purposes.

[0459] There is also a need for reagents capable of identifying the source of a particular tissue. Such need arises, for example, in forensics when presented with tissue of unknown origin. Appropriate reagents can comprise, for example, DNA probes or primers prepared from the sequences of the present invention, specific to tissues, including but not limited to those shown in Table 1B. Panels of such reagents can identify tissue by species and/or by organ type. In a similar fashion, these reagents can be used to screen tissue cultures for contamination. Additional non-limiting examples of such uses are further described herein.

[0460] The polynucleotides of the present invention are also useful as hybridization probes for differential identification of the tissue(s) or cell type(s) present in a biological sample. Similarly, polypeptides and antibodies directed to polypeptides of the present invention are useful to provide immunological probes for differential identification of the tissue(s) (e.g., immunohistochemistry assays) or cell type(s) (e.g., immunocytochemistry assays). In addition, for a number of disorders of the above tissues or cells, significantly higher or lower levels of gene expression of the polynucleotides/polypeptides of the present invention may be detected in certain tissues (e.g., tissues expressing polypeptides and/or polynucleotides of the present invention, for example, those disclosed in Table 1B, and/or cancerous and/or wounded tissues) or bodily fluids (e.g., semen, lymph, vaginal pool, serum, plasma, urine, synovial fluid or spinal fluid) taken from an individual having such a disorder, relative to a “standard” gene expression level, i.e., the expression level in healthy tissue from an individual not having the disorder.

[0461] Thus, the invention provides a diagnostic method of a disorder, which involves: (a) assaying gene expression level in cells or body fluid of an individual; (b) comparing the gene expression level with a standard gene expression level, whereby an increase or decrease in the assayed gene expression level compared to the standard expression level is indicative of a disorder.

[0462] In the very least, the polynucleotides of the present invention can be used as molecular weight markers on Southern gels, as diagnostic probes for the presence of a specific mRNA in a particular cell type, as a probe to “subtract-out” known sequences in the process of discovering novel polynucleotides, for selecting and making oligomers for attachment to a “gene chip” or other support, to raise anti-DNA antibodies using DNA immunization techniques, and as an antigen to elicit an immune response.

[0463] Uses of the Polypeptides

[0464] Each of the polypeptides identified herein can be used in numerous ways. The following description should be considered exemplary and utilizes known techniques.

[0465] Polypeptides and antibodies directed to polypeptides of the present invention are useful to provide immunological probes for differential identification of the tissue(s) (e.g., immunohistochemistry assays such as, for example, ABC immunoperoxidase (Hsu et al., J. Histochem. Cytochem. 29:577-580 (1981)) or cell type(s) (e.g., immunocytochemistry assays).

[0466] Antibodies can be used to assay levels of polypeptides encoded by polynucleotides of the invention in a biological sample using classical immunohistological methods known to those of skill in the art (e.g., see Jalkanen, et al., J. Cell. Biol. 101:976-985 (1985); Jalkanen, et al., J. Cell. Biol. 105:3087-3096 (1987)). Other antibody-based methods useful for detecting protein gene expression include immunoassays, such as the enzyme linked immunosorbent assay (ELISA) and the radioimmunoassay (RIA). Suitable antibody assay labels are known in the art and include enzyme labels, such as, glucose oxidase; radioisotopes, such as iodine (¹³¹I, ¹²⁵I, ¹²³I, ¹²¹), carbon (¹⁴C), sulfur (³⁵S), tritium (³H), indium (^{115m}In, ^{113m}In, ¹¹²In, ¹¹¹In), and technetium (⁹⁹Tc, ^{99m}Tc), thallium (²⁰¹Ti), gallium (⁶⁸Ga, ⁶⁷Ga), palladium (¹⁰³Pd), molybdenum (⁹⁹Mo), xenon (¹³³Xe), fluorine (¹⁸F), ¹⁵³Sm, ¹⁷⁷Lu, ¹⁵⁹Gd, ¹⁴⁹Pm, ¹⁴⁰La, ¹⁷⁵Yb, ¹⁶⁶Ho, ⁹⁰Y, ⁴⁷Sc, ¹⁸⁶Re, ¹⁸⁸Re, ¹⁴²Pr, ¹⁰⁵Rh, ⁹⁷Ru; luminescent labels, such as luminol; and fluorescent labels, such as fluorescein and rhodamine, and biotin.

[0467] In addition to assaying levels of polypeptide of the present invention in a biological sample, proteins can also be detected in vivo by imaging. Antibody labels or markers for in vivo imaging of protein include those detectable by X-radiography, NMR or ESR. For X-radiography, suitable labels include radioisotopes such as barium or cesium, which emit detectable radiation but are not overtly harmful to the subject. Suitable markers for NMR and ESR include those with a detectable characteristic spin, such as deuterium, which may be incorporated into the antibody by labeling of nutrients for the relevant hybridoma.

[0468] A protein-specific antibody or antibody fragment which has been labeled with an appropriate detectable imaging moiety, such as a radioisotope (for example, ¹³¹I, ¹¹²In, ^{99m}Tc, (¹³¹I, ¹²⁵I, ¹²³I, ¹²¹I), carbon (¹⁴C), sulfur (³⁵S), tritium (³H), indium (^{115m}In, ^{113m}In, ¹¹²In, ¹¹¹In), and technetium (⁹⁹Tc, ^{99m}Tc), thallium (²⁰¹Ti), gallium (⁶⁸Ga, ⁶⁷Ga), palladium (¹⁰³Pd), molybdenum (⁹⁹Mo), xenon (¹³³Xe), fluorine (¹⁸F, ¹⁵³Sm, ¹⁷⁷Lu, ¹⁵⁹Gd, ¹⁴⁹Pm, ¹⁴⁰La, ¹⁷⁵Yb, ¹⁶⁶Ho, ⁹⁰Y, ⁴⁷Sc, ¹⁸⁶Re, ¹⁸⁸Re, ¹⁴²Pr, ¹⁰⁵Rh, ⁹⁷Ru), a radio-opaque substance, or a material detectable by nuclear magnetic resonance, is introduced (for example, parenterally, subcutaneously or intraperitoneally) into the mammal to be examined for immune system disorder. It will be understood in the art that the size of the subject and the imaging system used will determine the quantity of imaging moiety needed to produce diagnostic images. In the case of a radioisotope moiety, for a human subject, the quantity of radioactivity injected will normally range from about 5 to 20 millicuries of ^{99m}Tc. The labeled antibody or antibody fragment will then preferentially accumulate at the location of cells which express the polypeptide encoded by a polynucleotide of the invention. In vivo tumor imaging is described in S. W. Burchiel et al., “Immunopharmacokinetics of Radiolabeled Antibodies and Their Fragments” (Chapter 13 in Tumor Imaging: The Radiochemical Detection of Cancer, S. W. Burchiel and B. A. Rhodes, eds., Masson Publishing Inc. (1982)).

[0469] In one embodiment, the invention provides a method for the specific delivery of compositions of the invention to cells by administering polypeptides of the invention (e.g., polypeptides encoded by polynucleotides of the invention and/or antibodies) that are associated with heterologous polypeptides or nucleic acids. In one example, the invention provides a method for delivering a therapeutic protein into the targeted cell. In another example, the invention provides a method for delivering a single stranded nucleic acid (e.g., antisense or ribozymes) or double stranded nucleic acid (e.g., DNA that can integrate into the cell's genome or replicate episomally and that can be transcribed) into the targeted cell.

[0470] In another embodiment, the invention provides a method for the specific destruction of cells (e.g., the destruction of tumor cells) by administering polypeptides of the invention in association with toxins or cytotoxic prodrugs.

[0471] By “toxin” is meant one or more compounds that bind and activate endogenous cytotoxic effector systems, radioisotopes, holotoxins, modified toxins, catalytic subunits of toxins, or any molecules or enzymes not normally present in or on the surface of a cell that under defined conditions cause the cell's death. Toxins that may be used according to the methods of the invention include, but are not limited to, radioisotopes known in the art, compounds such as, for example, antibodies (or complement fixing containing portions thereof) that bind an inherent or induced endogenous cytotoxic effector system, thymidine kinase, endonuclease, RNAse, alpha toxin, ricin, abrin, Pseudomonas exotoxin A, diphtheria toxin, saporin, momordin, gelonin, pokeweed antiviral protein, alpha-sarcin and cholera toxin. “Toxin” also includes a cytostatic or cytocidal agent, a therapeutic agent or a radioactive metal ion, e.g., alpha-emitters such as, for example, ²¹³Bi, or other radioisotopes such as, for example, ¹⁰³Pd, ¹³³Xe, ¹³¹I, ⁶⁸Ge, ⁵⁷Co, ⁶⁵Zn, ⁸⁵Sr, ³²P, ³⁵S, ⁹⁰Y, ¹⁵³Sm, ¹⁵³Gd, ¹⁶⁹Yb, ⁵¹Cr, ⁵⁴Mn, ⁷⁵Se, ¹¹³Sn, ⁹⁰Yttrium, ¹¹⁷Tin, ¹⁸⁶Rhenium, ¹⁶⁶Holmium, and ¹⁸⁸Rhenium; luminescent labels, such as luminol; and fluorescent labels, such as fluorescein and rhodamine, and biotin. In a specific embodiment, the invention provides a method for the specific destruction of cells (e.g., the destruction of tumor cells) by administering polypeptides of the invention or antibodies of the invention in association with the radioisotope ⁹⁰Y. In another specific embodiment, the invention provides a method for the specific destruction of cells (e.g., the destruction of tumor cells) by administering polypeptides of the invention or antibodies of the invention in association with the radioisotope ¹¹¹In. In a further specific embodiment, the invention provides a method for the specific destruction of cells (e.g., the destruction of tumor cells) by administering polypeptides of the invention or antibodies of the invention in association with the radioisotope ¹³¹I.

[0472] Techniques known in the art may be applied to label polypeptides of the invention (including antibodies). Such techniques include, but are not limited to, the use of bifunctional conjugating agents (see e.g., U.S. Pat. Nos. 5,756,065; 5,714,631; 5,696,239; 5,652,361; 5,505,931; 5,489,425; 5,435,990; 5,428,139; 5,342,604; 5,274,119; 4,994,560; and 5,808,003; the contents of each of which are hereby incorporated by reference in its entirety).

[0473] Thus, the invention provides a diagnostic method of a disorder, which involves (a) assaying the expression level of a polypeptide of the present invention in cells or body fluid of an individual; and (b) comparing the assayed polypeptide expression level with a standard polypeptide expression level, whereby an increase or decrease in the assayed polypeptide expression level compared to the standard expression level is indicative of a disorder. With respect to cancer, the presence of a relatively high amount of transcript in biopsied tissue from an individual may indicate a predisposition for the development of the disease, or may provide a means for detecting the disease prior to the appearance of actual clinical symptoms. A more definitive diagnosis of this type may allow health professionals to employ preventative measures or aggressive treatment earlier thereby preventing the development or further progression of the cancer.

[0474] Moreover, polypeptides of the present invention can be used to treat or prevent diseases or conditions such as, for example, neural disorders, immune system disorders, muscular disorders, reproductive disorders, gastrointestinal disorders, pulmonary disorders, cardiovascular disorders, renal disorders, proliferative disorders, and/or cancerous diseases and conditions. For example, patients can be administered a polypeptide of the present invention in an effort to replace absent or decreased levels of the polypeptide (e.g., insulin), to supplement absent or decreased levels of a different polypeptide (e.g., hemoglobin S for hemoglobin B, SOD, catalase, DNA repair proteins), to inhibit the activity of a polypeptide (e.g., an oncogene or tumor supressor), to activate the activity of a polypeptide (e.g., by binding to a receptor), to reduce the activity of a membrane bound receptor by competing with it for free ligand (e.g., soluble TNF receptors used in reducing inflammation), or to bring about a desired response (e.g., blood vessel growth inhibition, enhancement of the immune response to proliferative cells or tissues).

[0475] Similarly, antibodies directed to a polypeptide of the present invention can also be used to treat disease (as described supra, and elsewhere herein). For example, administration of an antibody directed to a polypeptide of the present invention can bind, and/or neutralize the polypeptide, and/or reduce overproduction of the polypeptide. Similarly, administration of an antibody can activate the polypeptide, such as by binding to a polypeptide bound to a membrane (receptor).

[0476] At the very least, the polypeptides of the present invention can be used as molecular weight markers on SDS-PAGE gels or on molecular sieve gel filtration columns using methods well known to those of skill in the art. Polypeptides can also be used to raise antibodies, which in turn are used to measure protein expression from a recombinant cell, as a way of assessing transformation of the host cell. Moreover, the polypeptides of the present invention can be used to test the biological activities described herein.

[0477] Diagnostic Assays

[0478] The compounds of the present invention are useful for diagnosis, treatment, prevention and/or prognosis of various disorders in mammals, preferably humans. Such disorders include, but are not limited to, those related to biological activities described in Table 1D and, also as described herein under the section heading “Biological Activities”.

[0479] For a number of disorders, substantially altered (increased or decreased) levels of gene expression can be detected in tissues, cells or bodily fluids (e.g., sera, plasma, urine, semen, synovial fluid or spinal fluid) taken from an individual having such a disorder, relative to a “standard” gene expression level, that is, the expression level in tissues or bodily fluids from an individual not having the disorder. Thus, the invention provides a diagnostic method useful during diagnosis of a disorder, which involves measuring the expression level of the gene encoding the polypeptide in tissues, cells or body fluid from an individual and comparing the measured gene expression level with a standard gene expression level, whereby an increase or decrease in the gene expression level(s) compared to the standard is indicative of a disorder. These diagnostic assays may be performed in vivo or in vitro, such as, for example, on blood samples, biopsy tissue or autopsy tissue.

[0480] The present invention is also useful as a prognostic indicator, whereby patients exhibiting enhanced or depressed gene expression will experience a worse clinical outcome relative to patients expressing the gene at a level nearer the standard level.

[0481] In certain embodiments, a polypeptide of the invention, or polynucleotides, antibodies, agonists, or antagonists corresponding to that polypeptide, may be used to diagnose and/or prognosticate diseases and/or disorders associated with the tissue(s) in which the polypeptide of the invention is expressed, including one, two, three, four, five, or more tissues disclosed in Table 1B.2, column 5 (Tissue Distribution Library Code).

[0482] By “assaying the expression level of the gene encoding the polypeptide” is intended qualitatively or quantitatively measuring or estimating the level of the polypeptide of the invention or the level of the mRNA encoding the polypeptide of the invention in a first biological sample either directly (e.g., by determining or estimating absolute protein level or mRNA level) or relatively (e.g., by comparing to the polypeptide level or mRNA level in a second biological sample). Preferably, the polypeptide expression level or mRNA level in the first biological sample is measured or estimated and compared to a standard polypeptide level or mRNA level, the standard being taken from a second biological sample obtained from an individual not having the disorder or being determined by averaging levels from a population of individuals not having the disorder. As will be appreciated in the art, once a standard polypeptide level or mRNA level is known, it can be used repeatedly as a standard for comparison.

[0483] By “biological sample” is intended any biological sample obtained from an individual, cell line, tissue culture, or other source containing polypeptides of the invention (including portions thereof) or mRNA. As indicated, biological samples include body fluids (such as sera, plasma, urine, synovial fluid and spinal fluid) and tissue sources found to express the full length or fragments thereof of a polypeptide or mRNA. Methods for obtaining tissue biopsies and body fluids from mammals are well known in the art. Where the biological sample is to include mRNA, a tissue biopsy is the preferred source.

[0484] Total cellular RNA can be isolated from a biological sample using any suitable technique such as the single-step guanidinium-thiocyanate-phenol-chloroform method described in Chomczynski and Sacchi, Anal. Biochem. 162:156-159 (1987). Levels of mRNA encoding the polypeptides of the invention are then assayed using any appropriate method. These include Northern blot analysis, S1 nuclease mapping, the polymerase chain reaction (PCR), reverse transcription in combination with the polymerase chain reaction (RT-PCR), and reverse transcription in combination with the ligase chain reaction (RT-LCR).

[0485] The present invention also relates to diagnostic assays such as quantitative and diagnostic assays for detecting levels of polypeptides of the invention, in a biological sample (e.g., cells and tissues), including determination of normal and abnormal levels of polypeptides. Thus, for instance, a diagnostic assay in accordance with the invention for detecting over-expression of polypeptides of the invention compared to normal control tissue samples may be used to detect the presence of tumors. Assay techniques that can be used to determine levels of a polypeptide, such as a polypeptide of the present invention in a sample derived from a host are well-known to those of skill in the art. Such assay methods include radioimmunoassays, competitive-binding assays, Western Blot analysis and ELISA assays. Assaying polypeptide levels in a biological sample can occur using any art-known method.

[0486] Assaying polypeptide levels in a biological sample can occur using antibody-based techniques. For example, polypeptide expression in tissues can be studied with classical immunohistological methods (Jalkanen et al., J. Cell. Biol. 101:976-985 (1985); Jalkanen, M., et al., J. Cell. Biol. 105:3087-3096 (1987)). Other antibody-based methods useful for detecting polypeptide gene expression include immunoassays, such as the enzyme linked immunosorbent assay (ELISA) and the radioimmunoassay (RIA). Suitable antibody assay labels are known in the art and include enzyme labels, such as, glucose oxidase, and radioisotopes, such as iodine (¹²⁵I, ¹²¹I), carbon (¹⁴C), sulfur (³⁵S), tritium (³H), indium (¹¹²In), and technetium (^{99m}Tc), and fluorescent labels, such as fluorescein and rhodamine, and biotin.

[0487] The tissue or cell type to be analyzed will generally include those which are known, or suspected, to express the gene of inteest (such as, for example, cancer). The protein isolation methods employed herein may, for example, be such as those described in Harlow and Lane (Harlow, E. and Lane, D., 1988, “Antibodies: A Laboratory Manual”, Cold Spring Harbor Laboratory Press, Cold Spring Harbor, N.Y.), which is incorporated herein by reference in its entirety. The isolated cells can be derived from cell culture or from a patient. The analysis of cells taken from culture may be a necessary step in the assessment of cells that could be used as part of a cell-based gene therapy technique or, alternatively, to test the effect of compounds on the expression of the gene.

[0488] For example, antibodies, or fragments of antibodies, such as those described herein, may be used to quantitatively or qualitatively detect the presence of gene products or conserved variants or peptide fragments thereof. This can be accomplished, for example, by immunofluorescence techniques employing a fluorescently labeled antibody coupled with light microscopic, flow cytometric, or fluorimetric detection.

[0489] In a preferred embodiment, antibodies, or fragments of antibodies directed to any one or all of the predicted epitope domains of the polypeptides of the invention (shown in Table 1B) may be used to quantitatively or qualitatively detect the presence of gene products or conserved variants or peptide fragments thereof. This can be accomplished, for example, by immunofluorescence techniques employing a fluorescently labeled antibody coupled with light microscopic, flow cytometric, or fluorimetric detection.

[0490] In an additional preferred embodiment, antibodies, or fragments of antibodies directed to a conformational epitope of a polypeptide of the invention may be used to quantitatively or qualitatively detect the presence of gene products or conserved variants or peptide fragments thereof. This can be accomplished, for example, by immunofluorescence techniques employing a fluorescently labeled antibody coupled with light microscopic, flow cytometric, or fluorimetric detection.

[0491] The antibodies (or fragments thereof), and/or polypeptides of the present invention may, additionally, be employed histologically, as in immunofluorescence, immunoelectron microscopy or non-immunological assays, for in situ detection of gene products or conserved variants or peptide fragments thereof. In situ detection may be accomplished by removing a histological specimen from a patient, and applying thereto a labeled antibody or polypeptide of the present invention. The antibody (or fragment thereof) or polypeptide is preferably applied by overlaying the labeled antibody (or fragment) onto a biological sample. Through the use of such a procedure, it is possible to determine not only the presence of the gene product, or conserved variants or peptide fragments, or polypeptide binding, but also its distribution in the examined tissue. Using the present invention, those of ordinary skill will readily perceive that any of a wide variety of histological methods (such as staining procedures) can be modified in order to achieve such in situ detection.

[0492] Immunoassays and non-immunoassays for gene products or conserved variants or peptide fragments thereof will typically comprise incubating a sample, such as a biological fluid, a tissue extract, freshly harvested cells, or lysates of cells which have been incubated in cell culture, in the presence of a detectably labeled antibody capable of binding gene products or conserved variants or peptide fragments thereof, and detecting the bound antibody by any of a number of techniques well-known in the art.

[0493] The biological sample may be brought in contact with and immobilized onto a solid phase support or carrier such as nitrocellulose, or other solid support which is capable of immobilizing cells, cell particles or soluble proteins. The support may then be washed with suitable buffers followed by treatment with the detectably labeled antibody or detectable polypeptide of the invention. The solid phase support may then be washed with the buffer a second time to remove unbound antibody or polypeptide. Optionally the antibody is subsequently labeled. The amount of bound label on solid support may then be detected by conventional means.

[0494] By “solid phase support or carrier” is intended any support capable of binding an antigen or an antibody. Well-known supports or carriers include glass, polystyrene, polypropylene, polyethylene, dextran, nylon, amylases, natural and modified celluloses, polyacrylamides, gabbros, and magnetite. The nature of the carrier can be either soluble to some extent or insoluble for the purposes of the present invention. The support material may have virtually any possible structural configuration so long as the coupled molecule is capable of binding to an antigen or antibody. Thus, the support configuration may be spherical, as in a bead, or cylindrical, as in the inside surface of a test tube, or the external surface of a rod. Alternatively, the surface may be flat such as a sheet, test strip, etc. Preferred supports include polystyrene beads. Those skilled in the art will know many other suitable carriers for binding antibody or antigen, or will be able to ascertain the same by use of routine experimentation.

[0495] The binding activity of a given lot of antibody or antigen polypeptide may be determined according to well known methods. Those skilled in the art will be able to determine operative and optimal assay conditions for each determination by employing routine experimentation.

[0496] In addition to assaying polypeptide levels or polynucleotide levels in a biological sample obtained from an individual, polypeptide or polynucleotide can also be detected in vivo by imaging. For example, in one embodiment of the invention, polypeptides and/or antibodies of the invention are used to image diseased cells, such as neoplasms. In another embodiment, polynucleotides of the invention (e.g., polynucleotides complementary to all or a portion of an mRNA) and/or antibodies (e.g., antibodies directed to any one or a combination of the epitopes of a polypeptide of the invention, antibodies directed to a conformational epitope of a polypeptide of the invention, or antibodies directed to the full length polypeptide expressed on the cell surface of a mammalian cell) are used to image diseased or neoplastic cells.

[0497] Antibody labels or markers for in vivo imaging of polypeptides of the invention include those detectable by X-radiography, NMR, MRI, CAT-scans or ESR. For X-radiography, suitable labels include radioisotopes such as barium or cesium, which emit detectable radiation but are not overtly harmful to the subject. Suitable markers for NMR and ESR include those with a detectable characteristic spin, such as deuterium, which may be incorporated into the antibody by labeling of nutrients for the relevant hybridoma. Where in vivo imaging is used to detect enhanced levels of polypeptides for diagnosis in humans, it may be preferable to use human antibodies or “humanized” chimeric monoclonal antibodies. Such antibodies can be produced using techniques described herein or otherwise known in the art. For example methods for producing chimeric antibodies are known in the art. See, for review, Morrison, Science 229:1202 (1985); Oi et al., BioTechniques 4:214 (1986); Cabilly et al., U.S. Pat. No. 4,816,567; Taniguchi et al., EP 171496; Morrison et al., EP 173494; Neuberger et al., WO 8601533; Robinson et al., WO 8702671; Boulianne et al., Nature 312:643 (1984); Neuberger et al., Nature 314:268 (1985).

[0498] Additionally, any polypeptides of the invention whose presence can be detected, can be administered. For example, polypeptides of the invention labeled with a radio-opaque or other appropriate compound can be administered and visualized in vivo, as discussed, above for labeled antibodies. Further, such polypeptides can be utilized for in vitro diagnostic procedures.

[0499] A polypeptide-specific antibody or antibody fragment which has been labeled with an appropriate detectable imaging moiety, such as a radioisotope (for example, ¹³¹I, ¹¹²In, ^{99m}Tc), a radio-opaque substance, or a material detectable by nuclear magnetic resonance, is introduced (for example, parenterally, subcutaneously or intraperitoneally) into the mammal to be examined for a disorder. It will be understood in the art that the size of the subject and the imaging system used will determine the quantity of imaging moiety needed to produce diagnostic images. In the case of a radioisotope moiety, for a human subject, the quantity of radioactivity injected will normally range from about 5 to 20 millicuries of ^{99m}Tc. The labeled antibody or antibody fragment will then preferentially accumulate at the location of cells which contain the antigenic protein. In vivo tumor imaging is described in S. W. Burchiel et al., “Immunopharmacokinetics of Radiolabeled Antibodies and Their Fragments” (Chapter 13 in Tumor Imaging: The Radiochemical Detection of Cancer, S. W. Burchiel and B. A. Rhodes, eds., Masson Publishing Inc. (1982)).

[0500] With respect to antibodies, one of the ways in which an antibody of the present invention can be detectably labeled is by linking the same to a reporter enzyme and using the linked product in an enzyme immunoassay (EIA) (Voller, A., “The Enzyme Linked Immunosorbent Assay (ELISA)”, 1978, Diagnostic Horizons 2:1-7, Microbiological Associates Quarterly Publication, Walkersville, Md.); Voller et al., J. Clin. Pathol. 31:507-520 (1978); Butler, J. E., Meth. Enzymol. 73:482-523 (1981); Maggio, E. (ed.), 1980, Enzyme Immunoassay, CRC Press, Boca Raton, Fla.; Ishikawa, E. et al., (eds.), 1981, Enzyme Immunoassay, Kgaku Shoin, Tokyo). The reporter enzyme which is bound to the antibody will react with an appropriate substrate, preferably a chromogenic substrate, in such a manner as to produce a chemical moiety which can be detected, for example, by spectrophotometric, fluorimetric or by visual means. Reporter enzymes which can be used to detectably label the antibody include, but are not limited to, malate dehydrogenase, staphylococcal nuclease, delta-5-steroid isomerase, yeast alcohol dehydrogenase, alpha-glycerophosphate, dehydrogenase, triose phosphate isomerase, horseradish peroxidase, alkaline phosphatase, asparaginase, glucose oxidase, beta-galactosidase, ribonuclease, urease, catalase, glucose-6-phosphate dehydrogenase, glucoamylase and acetylcholinesterase. Additionally, the detection can be accomplished by calorimetric methods which employ a chromogenic substrate for the reporter enzyme. Detection may also be accomplished by visual comparison of the extent of enzymatic reaction of a substrate in comparison with similarly prepared standards.

[0501] Detection may also be accomplished using any of a variety of other immunoassays. For example, by radioactively labeling the antibodies or antibody fragments, it is possible to detect polypeptides through the use of a radioimmunoassay (RIA) (see, for example, Weintraub, B., Principles of Radioimmunoassays, Seventh Training Course on Radioligand Assay Techniques, The Endocrine Society, March, 1986, which is incorporated by reference herein). The radioactive isotope can be detected by means including, but not limited to, a gamma counter, a scintillation counter, or autoradiography.

[0502] It is also possible to label the antibody with a fluorescent compound. When the fluorescently labeled antibody is exposed to light of the proper wave length, its presence can then be detected due to fluorescence. Among the most commonly used fluorescent labeling compounds are fluorescein isothiocyanate, rhodamine, phycoerythrin, phycocyanin, allophycocyanin, ophthaldehyde and fluorescamine.

[0503] The antibody can also be detectably labeled using fluorescence emitting metals such as ¹⁵²Eu, or others of the lanthanide series. These metals can be attached to the antibody using such metal chelating groups as diethylenetriaminepentacetic acid (DTPA) or ethylenediaminetetraacetic acid (EDTA).

[0504] The antibody also can be detectably labeled by coupling it to a chemiluminescent compound. The presence of the chemiluminescent-tagged antibody is then determined by detecting the presence of luminescence that arises during the course of a chemical reaction. Examples of particularly useful chemiluminescent labeling compounds are luminol, isoluminol, theromatic acridinium ester, imidazole, acridinium salt and oxalate ester.

[0505] Likewise, a bioluminescent compound may be used to label the antibody of the present invention. Bioluminescence is a type of chemiluminescence found in biological systems in, which a catalytic protein increases the efficiency of the chemiluminescent reaction. The presence of a bioluminescent protein is determined by detecting the presence of luminescence. Important bioluminescent compounds for purposes of labeling are luciferin, luciferase and aequorin.

[0506] Methods for Detecting Diseases

[0507] In general, a disease may be detected in a patient based on the presence of one or more proteins of the invention and/or polynucleotides encoding such proteins in a biological sample (for example, blood, sera, urine, and/or tumor biopsies) obtained from the patient. In other words, such proteins may be used as markers to indicate the presence or absence of a disease or disorder, including cancer and/or as described elsewhere herein. In addition, such proteins may be useful for the detection of other diseases and cancers. The binding agents provided herein generally permit detection of the level of antigen that binds to the agent in the biological sample. Polynucleotide primers and probes may be used to detect the level of mRNA encoding polypeptides of the invention, which is also indicative of the presence or absence of a disease or disorder, including cancer. In general, polypeptides of the invention should be present at a level that is at least three fold higher in diseased tissue than in normal tissue.

[0508] There are a variety of assay formats known to those of ordinary skill in the art for using a binding agent to detect polypeptide markers in a sample. See, e.g., Harlow and Lane, supra. In general, the presence or absence of a disease in a patient may be determined by (a) contacting a biological sample obtained from a patient with a binding agent; (b) detecting in the sample a level of polypeptide that binds to the binding agent; and (c) comparing the level of polypeptide with a predetermined cut-off value.

[0509] In a preferred embodiment, the assay involves the use of a binding agent(s) immobilized on a solid support to bind to and remove the polypeptide of the invention from the remainder of the sample. The bound polypeptide may then be detected using a detection reagent that contains a reporter group and specifically binds to the binding agent/polypeptide complex. Such detection reagents may comprise, for example, a binding agent that specifically binds to the polypeptide or an antibody or other agent that specifically binds to the binding agent, such as an anti-immunoglobulin, protein G, protein A or a lectin. Alternatively, a competitive assay may be utilized, in which a polypeptide is labeled with a reporter group and allowed to bind to the immobilized binding agent after incubation of the binding agent with the sample. The extent to which components of the sample inhibit the binding of the labeled polypeptide to the binding agent is indicative of the reactivity of the sample with the immobilized binding agent. Suitable polypeptides for use within such assays include polypeptides of the invention and portions thereof, or antibodies, to which the binding agent binds, as described above.

[0510] The solid support may be any material known to those of skill in the art to which polypeptides of the invention may be attached. For example, the solid support may be a test well in a microtiter plate or a nitrocellulose or other suitable membrane. Alternatively, the support may be a bead or disc, such as glass fiberglass, latex or a plastic material such as polystyrene or polyvinylchloride. The support may also be a magnetic particle or a fiber optic sensor, such as those disclosed, for example, in U.S. Pat. No. 5,359,681. The binding agent may be immobilized on the solid support using a variety of techniques known to those of skill in the art, which are amply described in the patent and scientific literature. In the context of the present invention, the term “immobilization” refers to both noncovalent association, such as adsorption, and covalent attachment (which may be a direct linkage between the agent and functional groups on the support or may be a linkage by way of a cross-linking agent). Immobilization by adsorption to a well in a microtiter plate or to a membrane is preferred. In such cases, adsorption may be achieved by contacting the binding agent, in a suitable buffer, with the solid support for the suitable amount of time. The contact time varies with temperature, but is typically between about 1 hour and about 1 day. In general, contacting a well of plastic microtiter plate (such as polystyrene or polyvinylchloride) with an amount of binding agent ranging from about 10 ng to about 10 ug, and preferably about 100 ng to about 1 ug, is sufficient to immobilize an adequate amount of binding agent.

[0511] Covalent attachment of binding agent to a solid support may generally be achieved by first reacting the support with a bifunctional reagent that will react with both the support and a functional group, such as a hydroxyl or amino group, on the binding agent. For example, the binding agent may be covalently attached to supports having an appropriate polymer coating using benzoquinone or by condensation of an aldehyde group on the support with an amine and an active hydrogen on the binding partner (see, e.g., Pierce Immunotechnology Catalog and Handbook, 1991, at A12-A13).

[0512] Gene Therapy Methods

[0513] Also encompassed by the invention are gene therapy methods for treating or preventing disorders, diseases and conditions. The gene therapy methods relate to the introduction of nucleic acid (DNA, RNA and antisense DNA or RNA) sequences into an animal to achieve expression of the polypeptide of the present invention. This method requires a polynucleotide which codes for a polypeptide of the present invention operatively linked to a promoter and any other genetic elements necessary for the expression of the polypeptide by the target tissue. Such gene therapy and delivery techniques are known in the art, see, for example, WO90/11092, which is herein incorporated by reference.

[0514] Thus, for example, cells from a patient may be engineered with a polynucleotide (DNA or RNA) comprising a promoter operably linked to a polynucleotide of the present invention ex vivo, with the engineered cells then being provided to a patient to be treated with the polypeptide of the present invention. Such methods are well-known in the art. For example, see Belldegrun, A., et al., J. Natl. Cancer Inst. 85: 207-216 (1993); Ferrantini, M. et al., Cancer Research 53: 1107-1112 (1993); Ferrantini, M. et al., J. Immunology 153: 4604-4615 (1994); Kaido, T., et al., Int. J. Cancer 60: 221-229 (1995); Ogura, H., et al., Cancer Research 50: 5102-5106 (1990); Santodonato, L., et al., Human Gene Therapy 7:1-10 (1996); Santodonato, L., et al., Gene Therapy 4:1246-1255 (1997); and Zhang, J.-F. et al., Cancer Gene Therapy 3: 31-38 (1996)), which are herein incorporated by reference. In one embodiment, the cells which are engineered are arterial cells. The arterial cells may be reintroduced into the patient through direct injection to the artery, the tissues surrounding the artery, or through catheter injection.

[0515] As discussed in more detail below, the polynucleotide constructs can be delivered by any method that delivers injectable materials to the cells of an animal, such as, injection into the interstitial space of tissues (heart, muscle, skin, lung, liver, and the like). The polynucleotide constructs may be delivered in a pharmaceutically acceptable liquid or aqueous carrier.

[0516] In one embodiment, the polynucleotide of the present invention is delivered as a naked polynucleotide. The term “naked” polynucleotide, DNA or RNA refers to sequences that are free from any delivery vehicle that acts to assist, promote or facilitate entry into the cell, including viral sequences, viral particles, liposome formulations, lipofectin or precipitating agents and the like. However, the polynucleotide of the present invention can also be delivered in liposome formulations and lipofectin formulations and the like can be prepared by methods well known to those skilled in the art. Such methods are described, for example, in U.S. Pat. Nos. 5,593,972, 5,589,466, and 5,580,859, which are herein incorporated by reference.

[0517] The polynucleotide vector constructs used in the gene therapy method are preferably constructs that will not integrate into the host genome nor will they contain sequences that allow for replication. Appropriate vectors include pWLNEO, pSV2CAT, pOG44, pXT1 and pSG available from Stratagene; pSVK3, pBPV, pMSG and pSVL available from Pharmacia; and pEF1/V5, pcDNA3.1, and pRc/CMV2 available from Invitrogen. Other suitable vectors will be readily apparent to the skilled artisan.

[0518] Any strong promoter known to those skilled in the art can be used for driving the expression of the polynucleotide sequence. Suitable promoters include adenoviral promoters, such as the adenoviral major late promoter; or heterologous promoters, such as the cytomegalovirus (CMV) promoter; the respiratory syncytial virus (RSV) promoter; inducible promoters, such as the MMT promoter, the metallothionein promoter; heat shock promoters; the albumin promoter; the ApoAI promoter; human globin promoters; viral thymidine kinase promoters, such as the Herpes Simplex thymidine kinase promoter; retroviral LTRs; the b-actin promoter; and human growth hormone promoters. The promoter also may be the native promoter for the polynucleotide of the present invention.

[0519] Unlike other gene therapy techniques, one major advantage of introducing naked nucleic acid sequences into target cells is the transitory nature of the polynucleotide synthesis in the cells. Studies have shown that non-replicating DNA sequences can be introduced into cells to provide production of the desired polypeptide for periods of up to six months.

[0520] The polynucleotide construct can be delivered to the interstitial space of tissues within the an animal, including of muscle, skin, brain, lung, liver, spleen, bone marrow, thymus, heart, lymph, blood, bone, cartilage, pancreas, kidney, gall bladder, stomach, intestine, testis, ovary, uterus, rectum, nervous system, eye, gland, and connective tissue. Interstitial space of the tissues comprises the intercellular, fluid, mucopolysaccharide matrix among the reticular fibers of organ tissues, elastic fibers in the walls of vessels or chambers, collagen fibers of fibrous tissues, or that same matrix within connective tissue ensheathing muscle cells or in the lacunae of bone. It is similarly the space occupied by the plasma of the circulation and the lymph fluid of the lymphatic channels. Delivery to the interstitial space of muscle tissue is preferred for the reasons discussed below. They may be conveniently delivered by injection into the tissues comprising these cells. They are preferably delivered to and expressed in persistent, non-dividing cells which are differentiated, although delivery and expression may be achieved in non-differentiated or less completely differentiated cells, such as, for example, stem cells of blood or skin fibroblasts. In vivo muscle cells are particularly competent in their ability to take up and express polynucleotides.

[0521] For the naked nucleic acid sequence injection, an effective dosage amount of DNA or RNA will be in the range of from about 0.05 mg/kg body weight to about 50 mg/kg body weight. Preferably the dosage will be from about 0.005 mg/kg to about 20 mg/kg and more preferably from about 0.05 mg/kg to about 5 mg/kg. Of course, as the artisan of ordinary skill will appreciate, this dosage will vary according to the tissue site of injection. The appropriate and effective dosage of nucleic acid sequence can readily be determined by those of ordinary skill in the art and may depend on the condition being treated and the route of administration.

[0522] The preferred route of administration is by the parenteral route of injection into the interstitial space of tissues. However, other parenteral routes may also be used, such as, inhalation of an aerosol formulation particularly for delivery to lungs or bronchial tissues, throat or mucous membranes of the nose. In addition, naked DNA constructs can be delivered to arteries during angioplasty by the catheter used in the procedure.

[0523] The naked polynucleotides are delivered by any method known in the art, including, but not limited to, direct needle injection at the delivery site, intravenous injection, topical administration, catheter infusion, and so-called “gene guns”. These delivery methods are known in the art.

[0524] The constructs may also be delivered with delivery vehicles such as viral sequences, viral particles, liposome formulations, lipofectin, precipitating agents, etc. Such methods of delivery are known in the art.

[0525] In certain embodiments, the polynucleotide constructs are complexed in a liposome preparation. Liposomal preparations for use in the instant invention include cationic (positively charged), anionic (negatively charged) and neutral preparations. However, cationic liposomes are particularly preferred because a tight charge complex can be formed between the cationic liposome and the polyanionic nucleic acid. Cationic liposomes have been shown to mediate intracellular delivery of plasmid DNA (Felgner et al., Proc. Natl. Acad. Sci. USA (1987) 84:7413-7416, which is herein incorporated by reference); mRNA (Malone et al., Proc. Natl. Acad. Sci. USA (1989) 86:6077-6081, which is herein incorporated by reference); and purified transcription factors (Debs et al., J. Biol. Chem. (1990) 265:10189-10192, which is herein incorporated by reference), in functional form.

[0526] Cationic liposomes are readily available. For example, N[1-2,3-dioleyloxy)propyl]-N,N,N-triethylammonium (DOTMA) liposomes are particularly useful and are available under the trademark Lipofectin, from GIBCO BRL, Grand Island, N.Y. (See, also, Felgner et al., Proc. Natl Acad. Sci. USA (1987) 84:7413-7416, which is herein incorporated by reference). Other commercially available liposomes include transfectace (DDAB/DOPE) and DOTAP/DOPE (Boehringer).

[0527] Other cationic liposomes can be prepared from readily available materials using techniques well known in the art. See, e.g. PCT Publication No. WO 90/11092 (which is herein incorporated by reference) for a description of the synthesis of DOTAP (1,2-bis(oleoyloxy)-3-(trimethylammonio)propane) liposomes. Preparation of DOTMA liposomes is explained in the literature, see, e.g., P. Felgner et al., Proc. Natl. Acad. Sci. USA 84:7413-7417, which is herein incorporated by reference. Similar methods can be used to prepare liposomes from other cationic lipid materials.

[0528] Similarly, anionic and neutral liposomes are readily available, such as from Avanti Polar Lipids (Birmingham, Ala.), or can be easily prepared using readily available materials. Such materials include phosphatidyl, choline, cholesterol, phosphatidyl ethanolamine, dioleoylphosphatidyl choline (DOPC), dioleoylphosphatidyl glycerol (DOPG), dioleoylphoshatidyl ethanolamine (DOPE), among others. These materials can also be mixed with the DOTMA and DOTAP starting materials in appropriate ratios. Methods for making liposomes using these materials are well known in the art.

[0529] For example, commercially dioleoylphosphatidyl choline (DOPC), dioleoylphosphatidyl glycerol (DOPG), and dioleoylphosphatidyl ethanolamine (DOPE) can be used in various combinations to make conventional liposomes, with or without the addition of cholesterol. Thus, for example, DOPG/DOPC vesicles can be prepared by drying 50 mg each of DOPG and DOPC under a stream of nitrogen gas into a sonication vial. The sample is placed under a vacuum pump overnight and is hydrated the following day with deionized water. The sample is then sonicated for 2 hours in a capped vial, using a Heat Systems model 350 sonicator equipped with an inverted cup (bath type) probe at the maximum setting while the bath is circulated at 15EC. Alternatively, negatively charged vesicles can be prepared without sonication to produce multilamellar vesicles or by extrusion through nucleopore membranes to produce unilamellar vesicles of discrete size. Other methods are known and available to those of skill in the art.

[0530] The liposomes can comprise multilamellar vesicles (MLVs), small unilamellar vesicles (SUVs), or large unilamellar vesicles (LUVs), with SUVs being preferred. The various liposome-nucleic acid complexes are prepared using methods well known in the art. See, e.g., Straubinger et al., Methods of Immunology (1983), 101:512-527, which is herein incorporated by reference. For example, MLVs containing nucleic acid can be prepared by depositing a thin film of phospholipid on the walls of a glass tube and subsequently hydrating with a solution of the material to be encapsulated. SUVs are prepared by extended sonication of MLVs to produce a homogeneous population of unilamellar liposomes. The material to be entrapped is added to a suspension of preformed MLVs and then sonicated. When using liposomes containing cationic lipids, the dried lipid film is resuspended in an appropriate solution such as sterile water or an isotonic buffer solution such as 10 mM Tris/NaCl, sonicated, and then the preformed liposomes are mixed directly with the DNA. The liposome and DNA form a very stable complex due to binding of the positively charged liposomes to the cationic DNA. SUVs find use with small nucleic acid fragments. LUVs are prepared by a number of methods, well known in the art. Commonly used methods include Ca²⁺-EDTA chelation (Papahadjopoulos et al., Biochim. Biophys. Acta (1975) 394:483; Wilson et al., Cell 17:77 (1979)); ether injection (Deamer, D. and Bangham, A., Biochim. Biophys. Acta 443:629 (1976); Ostro et al., Biochem. Biophys. Res. Commun. 76:836 (1977); Fraley et al., Proc. Natl. Acad. Sci. USA 76:3348 (1979)); detergent dialysis (Enoch, H. and Strittmatter, P., Proc. Natl. Acad. Sci. USA 76:145 (1979)); and reverse-phase evaporation (REV) (Fraley et al., J. Biol. Chem. 255:10431 (1980); Szoka, F. and Papahadjopoulos, D., Proc. Natl. Acad. Sci. USA 75:145 (1978); Schaefer-Ridder et al., Science 215:166 (1982)), which are herein incorporated by reference.

[0531] Generally, the ratio of DNA to liposomes will be from about 10:1 to about 1:10. Preferably, the ration will be from about 5:1 to about 1:5. More preferably, the ration will be about 3:1 to about 1:3. Still more preferably, the ratio will be about 1:1.

[0532] U.S. Pat. No. 5,676,954 (which is herein incorporated by reference) reports on the injection of genetic material, complexed with cationic liposomes carriers, into mice. U.S. Pat. Nos. 4,897,355, 4,946,787, 5,049,386, 5,459,127, 5,589,466, 5,693,622, 5,580,859, 5,703,055, and international publication no. WO 94/9469 (which are herein incorporated by reference) provide cationic lipids for use in transfecting DNA into cells and mammals. U.S. Pat. Nos. 5,589,466, 5,693,622, 5,580,859, 5,703,055, and international publication no. WO 94/9469 provide methods for delivering DNA-cationic lipid complexes to mammals.

[0533] In certain embodiments, cells are engineered, ex vivo or in vivo, using a retroviral particle containing RNA which comprises a sequence encoding a polypeptide of the present invention. Retroviruses from which the retroviral plasmid vectors may be derived include, but are not limited to, Moloney Murine Leukemia Virus, spleen necrosis virus, Rous sarcoma Virus, Harvey Sarcoma Virus, avian leukosis virus, gibbon ape leukemia virus, human immunodeficiency virus, Myeloproliferative Sarcoma Virus, and mammary tumor virus.

[0534] The retroviral plasmid vector is employed to transduce packaging cell lines to form producer cell lines. Examples of packaging cells which may be transfected include, but are not limited to, the PE501, PA317, R-2, R-AM, PA12, T19-14X, VT-19-17-H2, RCRE, RCRIP, GP+E-86, GP+envAm12, and DAN cell lines as described in Miller, Human Gene Therapy 1:5-14 (1990), which is incorporated herein by reference in its entirety. The vector may transduce the packaging cells through any means known in the art. Such means include, but are not limited to, electroporation, the use of liposomes, and CaPO₄ precipitation. In one alternative, the retroviral plasmid vector may be encapsulated into a liposome, or coupled to a lipid, and then administered to a host.

[0535] The producer cell line generates infectious retroviral vector particles which include polynucleotide encoding a polypeptide of the present invention. Such retroviral vector particles then may be employed, to transduce eukaryotic cells, either in vitro or in vivo. The transduced eukaryotic cells will express a polypeptide of the present invention.

[0536] In certain other embodiments, cells are engineered, ex vivo or in vivo, with polynucleotide contained in an adenovirus vector. Adenovirus can be manipulated such that it encodes and expresses a polypeptide of the present invention, and at the same time is inactivated in terms of its ability to replicate in a normal lytic viral life cycle. Adenovirus expression is achieved without integration of the viral DNA into the host cell chromosome, thereby alleviating concerns about insertional mutagenesis. Furthermore, adenoviruses have been used as live enteric vaccines for many years with an excellent safety profile (Schwartz et al. Am. Rev. Respir. Dis. 109:233-238 (1974)). Finally, adenovirus mediated gene transfer has been demonstrated in a number of instances including transfer of alpha-1-antitrypsin and CFTR to the lungs of cotton rats (Rosenfeld, M. A. et al. (1991) Science 252:431-434; Rosenfeld et al., (1992) Cell 68:143-155). Furthermore, extensive studies to attempt to establish adenovirus as a causative agent in human cancer were uniformly negative (Green, M. et al. (1979) Proc. Natl. Acad. Sci. USA 76:6606).

[0537] Suitable adenoviral vectors useful in the present invention are described, for example, in Kozarsky and Wilson, Curr. Opin. Genet. Devel. 3:499-503 (1993); Rosenfeld et al., Cell 68:143-155 (1992); Engelhardt et al., Human Genet. Ther. 4:759-769 (1993); Yang et al., Nature Genet. 7:362-369 (1994); Wilson et al., Nature 365:691-692 (1993); and U.S. Pat. No. 5,652,224, which are herein incorporated by reference. For example, the adenovirus vector Ad2 is useful and can be grown in human 293 cells. These cells contain the E1 region of adenovirus and constitutively express E1a and E1b, which complement the defective adenoviruses by providing the products of the genes deleted from the vector. In addition to Ad2, other varieties of adenovirus (e.g., Ad3, Ad5, and Ad7) are also useful in the present invention.

[0538] Preferably, the adenoviruses used in the present invention are replication deficient. Replication deficient adenoviruses require the aid of a helper virus and/or packaging cell line to form infectious particles. The resulting virus is capable of infecting cells and can express a polynucleotide of interest which is operably linked to a promoter, but cannot replicate in most cells. Replication deficient adenoviruses may be deleted in one or more of all or a portion of the following genes: E1a, E1b, E3, E4, E2a, or L1 through L5.

[0539] In certain other embodiments, the cells are engineered, ex vivo or in vivo, using an adeno-associated virus (AAV). AAVs are naturally occurring defective viruses that require helper viruses to produce infectious particles (Muzyczka, N., Curr. Topics in Microbiol. Immunol. 158:97 (1992)). It is also one of the few viruses that may integrate its DNA into non-dividing cells. Vectors containing as little as 300 base pairs of AAV can be packaged and can integrate, but space for exogenous DNA is limited to about 4.5 kb. Methods for producing and using such AAVs are known in the art. See, for example, U.S. Pat. Nos. 5,139,941, 5,173,414, 5,354,678, 5,436,146, 5,474,935, 5,478,745, and 5,589,377.

[0540] For example, an appropriate AAV vector for use in the present invention will include all the sequences necessary for DNA replication, encapsidation, and host-cell integration. The polynucleotide construct is inserted into the AAV vector using standard cloning methods, such as those found in Sambrook et al., Molecular Cloning: A Laboratory Manual, Cold Spring Harbor Press (1989). The recombinant AAV vector is then transfected into packaging cells which are infected with a helper virus, using any standard technique, including lipofection, electroporation, calcium phosphate precipitation, etc. Appropriate helper viruses include adenoviruses, cytomegaloviruses, vaccinia viruses, or herpes viruses. Once the packaging cells are transfected and infected, they will produce infectious AAV viral particles which contain the polynucleotide construct. These viral particles are then used to transduce eukaryotic cells, either ex vivo or in vivo. The transduced cells will contain the polynucleotide construct integrated into its genome, and will express a polypeptide of the invention.

[0541] Another method of gene therapy involves operably associating heterologous control regions and endogenous polynucleotide sequences (e.g. encoding a polypeptide of the present invention) via homologous recombination (see, e.g., U.S. Pat. No. 5,641,670, issued Jun. 24, 1997; International Publication No. WO 96/29411, published Sep. 26, 1996; International Publication No. WO 94/12650, published Aug. 4, 1994; Koller et al., Proc. Natl. Acad. Sci. USA 86:8932-8935 (1989); and Zijistra et al., Nature 342:435-438 (1989), which are herein encorporated by reference. This method involves the activation of a gene which is present in the target cells, but which is not normally expressed in the cells, or is expressed at a lower level than desired.

[0542] Polynucleotide constructs are made, using standard techniques known in the art, which contain the promoter with targeting sequences flanking the promoter. Suitable promoters are described herein. The targeting sequence is sufficiently complementary to an endogenous sequence to permit homologous recombination of the promoter-targeting sequence with the endogenous sequence. The targeting sequence will be sufficiently near the 5′ end of the desired endogenous polynucleotide sequence so the promoter will be operably linked to the endogenous sequence upon homologous recombination.

[0543] The promoter and the targeting sequences can be amplified using PCR. Preferably, the amplified promoter contains distinct restriction enzyme sites on the 5′ and 3′ ends. Preferably, the 3′ end of the first targeting sequence contains the same restriction enzyme site as the 5′ end of the amplified promoter and the 5′ end of the second targeting sequence contains the same restriction site as the 3′ end of the amplified promoter. The amplified promoter and targeting sequences are digested and ligated together.

[0544] The promoter-targeting sequence construct is delivered to the cells, either as naked polynucleotide, or in conjunction with transfection-facilitating agents, such as liposomes, viral sequences, viral particles, whole viruses, lipofection, precipitating agents, etc., described in more detail above. The P promoter-targeting sequence can be delivered by any method, included direct needle injection, intravenous injection, topical administration, catheter infusion, particle accelerators, etc. The methods are described in more detail below.

[0545] The promoter-targeting sequence construct is taken up by cells. Homologous recombination between the construct and the endogenous sequence takes place, such that an endogenous sequence is placed under the control of the promoter. The promoter then drives the expression of the endogenous sequence.

[0546] The polynucleotide encoding a polypeptide of the present invention may contain a secretory signal sequence that facilitates secretion of the protein. Typically, the signal sequence is positioned in the coding region of the polynucleotide to be expressed towards or at the 5′ end of the coding region. The signal sequence may be homologous or heterologous to the polynucleotide of interest and may be homologous or heterologous to the cells to be transfected. Additionally, the signal sequence may be chemically synthesized using methods known in the art.

[0547] Any mode of administration of any of the above-described polynucleotides constructs can be used so long as the mode results in the expression of one or more molecules in an amount sufficient to provide a therapeutic effect. This includes direct needle injection, systemic injection, catheter infusion, biolistic injectors, particle accelerators (i.e., “gene guns”), gelfoam sponge depots, other commercially available depot materials, osmotic pumps (e.g., Alza minipumps), oral or suppositorial solid (tablet or pill) pharmaceutical formulations, and decanting or topical applications during surgery. For example, direct injection of naked calcium phosphate-precipitated plasmid into rat liver and rat spleen or a protein-coated plasmid into the portal vein has resulted in gene expression of the foreign gene in the rat livers (Kaneda et al., Science 243:375 (1989)).

[0548] A preferred method of local administration is by direct injection. Preferably, a recombinant molecule of the present invention complexed with a delivery vehicle is administered by direct injection into or locally within the area of arteries. Administration of a composition locally within the area of arteries refers to injecting the composition centimeters and preferably, millimeters within arteries.

[0549] Another method of local administration is to contact a polynucleotide construct of the present invention in or around a surgical wound. For example, a patient can undergo surgery and the polynucleotide construct can be coated on the surface of tissue inside the wound or the construct can be injected into areas of tissue inside the wound.

[0550] Therapeutic compositions useful in systemic administration, include recombinant molecules of the present invention complexed to a targeted delivery vehicle of the present invention. Suitable delivery vehicles for use with systemic administration comprise liposomes comprising ligands for targeting the vehicle to a particular site. In specific embodiments, suitable delivery vehicles for use with systemic administration comprise liposomes comprising polypeptides of the invention for targeting the vehicle to a particular site.

[0551] Preferred methods of systemic administration, include intravenous injection, aerosol, oral and percutaneous (topical) delivery. Intravenous injections can be performed using methods standard in the art. Aerosol delivery can also be performed using methods standard in the art (see, for example, Stribling et al., Proc. Natl. Acad. Sci. USA 189:11277-11281, 1992, which is incorporated herein by reference). Oral delivery can be performed by complexing a polynucleotide construct of the present invention to a carrier capable of withstanding degradation by digestive enzymes in the gut of an animal. Examples of such carriers, include plastic capsules or tablets, such as those known in the art. Topical delivery can be performed by mixing a polynucleotide construct of the present invention with a lipophilic reagent (e.g., DMSO) that is capable of passing into the skin.

[0552] Determining an effective amount of substance to be delivered can depend upon a number of factors including, for example, the chemical structure and biological activity of the substance, the age and weight of the animal, the precise condition requiring treatment and its severity, and the route of administration. The frequency of treatments depends upon a number of factors, such as the amount of polynucleotide constructs administered per dose, as well as the health and history of the subject. The precise amount, number of doses, and timing of doses will be determined by the attending physician or veterinarian.

[0553] Therapeutic compositions of the present invention can be administered to any animal, preferably to mammals and birds. Preferred mammals include humans, dogs, cats, mice, rats, rabbits sheep, cattle, horses and pigs, with humans being particularly preferred.

[0554] Biological Activities

[0555] Polynucleotides or polypeptides, or agonists or antagonists of the present invention, can be used in assays to test for one or more biological activities. If these polynucleotides or polypeptides, or agonists or antagonists of the present invention, do exhibit activity in a particular assay, it is likely that these molecules may be involved in the diseases associated with the biological activity. Thus, the polynucleotides and polypeptides, and agonists or antagonists could be used to treat the associated disease.

[0556] Members of the secreted family of proteins are believed to be involved in biological activities associated with, for example, cellular signaling. Accordingly, compositions of the invention (including polynucleotides, polypeptides and antibodies of the invention, and fragments and variants thereof) may be used in diagnosis, prognosis, prevention and/or treatment of diseases and/or disorders associated with aberrant activity of secreted polypeptides.

[0557] In preferred embodiments, compositions of the invention (including polynucleotides, polypeptides and antibodies of the invention, and fragments and variants thereof) may be used in the diagnosis, prognosis, prevention, treatment, and/or amelioration of diseases and/or disorders relating to diabetes mellitus and/or a condition associated with diabetes mellitus (e.g., hyperglycemia, obesity, diabetic retinopathy, mononeuropathy, polyneuropathy, atherosclerosis, ulcers, heart disease, anemia, stroke, gangrene (e.g., of the feet and hands), impotence, infection, cataract, poor kidney function, malfunctioning of the autonomic nervous system, impaired white blood cell function, Carpal tunnel syndrome, Dupuytren's contracture, diabetic ketoacidosis, and as described in “Renal Disorders”, “Wound Healing and Epithelial Cell Proliferation”, “Endocrine Disorders”, “Reproductive System Disorders”, and “Gastrointestinal Disorders” sections below).

[0558] In certain embodiments, a polypeptide of the invention, or polynucleotides, antibodies, agonists, or antagonists corresponding to that polypeptide, may be used to diagnose and/or prognosticate diseases and/or disorders associated with the tissue(s) in which the polypeptide of the invention is expressed including one, two, three, four, five, or more tissues disclosed in Table 1B.2, column 5 (Tissue Distribution Library Code).

[0559] Thus, polynucleotides, translation products and antibodies of the invention are useful in the diagnosis, detection, prevention, prognistication, and/or treatment of diseases and/or disorders associated with activities that include, but are not limited to, prohormone activation, neurotransmitter activity, cellular signaling, cellular proliferation, cellular differentiation, and cell migration.

[0560] More generally, polynucleotides, translation products and antibodies corresponding to this gene may be useful for the diagnosis, prognosis, prevention, treatment and/or amelioration of diseases and/or disorders associated with the following system or systems.

[0561] Renal Disorders

[0562] Polynucleotides, polypeptides, antibodies, and/or agonists or antagonists of the present invention, may be used to detect, prevent, diagnose, prognosticate, treat, and/or ameliorate disorders of the renal system. Renal disorders which can be detected, prevented, diagnosed, prognosticated, treated, and/or ameliorated with compositions of the invention include, but are not limited to, kidney failure, nephritis, blood vessel disorders of kidney, metabolic and congenital kidney disorders, urinary disorders of the kidney, autoimmune disorders, sclerosis and necrosis, electrolyte imbalance, and kidney cancers.

[0563] Kidney diseases which can be detected, prevented, diagnosed, prognosticated, treated, and/or ameliorated with compositions of the invention include, but are not limited to, acute kidney failure, chronic kidney failure, atheroembolic renal failure, end-stage renal disease, inflammatory diseases of the kidney (e.g., acute glomerulonephritis, postinfectious glomerulonephritis, rapidly progressive glomerulonephritis, nephrotic syndrome, membranous glomerulonephritis, familial nephrotic syndrome, membranoproliferative glomerulonephritis I and II, mesangial proliferative glomerulonephritis, chronic glomerulonephritis, acute tubulointerstitial nephritis, chronic tubulointerstitial nephritis, acute post-streptococcal glomerulonephritis (PSGN), pyelonephritis, lupus nephritis, chronic nephritis, interstitial nephritis, and post-streptococcal glomerulonephritis), blood vessel disorders of the kidneys (e.g., kidney infarction, atheroembolic kidney disease, cortical necrosis, malignant nephrosclerosis, renal vein thrombosis, renal underperfusion, renal retinopathy, renal ischemia-reperfusion, renal artery embolism, and renal artery stenosis), and kidney disorders resulting form urinary tract disease (e.g., pyelonephritis, hydronephrosis, urolithiasis (renal lithiasis, nephrolithiasis), reflux nephropathy, urinary tract infections, urinary retention, and acute or chronic unilateral obstructive uropathy.)

[0564] In addition, compositions of the invention can be used to detect, prevent, diagnose, prognosticate, treat, and/or ameliorate metabolic and congenital disorders of the kidney (e.g., uremia, renal amyloidosis, renal osteodystrophy, renal tubular acidosis, renal glycosuria, nephrogenic diabetes insipidus, cystinuria, Fanconi's syndrome, renal fibrocystic osteosis (renal rickets), Hartnup disease, Bartter's syndrome, Liddle's syndrome, polycystic kidney disease, medullary cystic disease, medullary sponge kidney, Alport's syndrome, nail-patella syndrome, congenital nephrotic syndrome, CRUSH syndrome, horseshoe kidney, diabetic nephropathy, nephrogenic diabetes insipidus, analgesic nephropathy, kidney stones, and membranous nephropathy), and autoimmune disorders of the kidney (e.g., systemic lupus erythematosus (SLE), Goodpasture syndrome, IgA nephropathy, and IgM mesangial proliferative glomerulonephritis).

[0565] Compositions of the invention can also be used to detect, prevent, diagnose, prognosticate, treat, and/or ameliorate sclerotic or necrotic disorders of the kidney (e.g., glomerulosclerosis, diabetic nephropathy, focal segmental glomerulosclerosis (FSGS), necrotizing glomerulonephritis, and renal papillary necrosis), cancers of the kidney (e.g., nephroma, hypemephroma, nephroblastoma, renal cell cancer, transitional cell cancer, renal adenocarcinoma, squamous cell cancer, and Wilm's tumor), and electrolyte imbalances (e.g., nephrocalcinosis, pyuria, edema, hydronephritis, proteinuria, hyponatremia, hypernatremia, hypokalemia, hyperkalemia, hypocalcemia, hypercalcemia, hypophosphatemia, and hyperphosphatemia).

[0566] Polypeptides may be administered using any method known in the art, including, but not limited to, direct needle injection at the delivery site, intravenous injection, topical administration, catheter infusion, biolistic injectors, particle accelerators, gelfoam sponge depots, other commercially available depot materials, osmotic pumps, oral or suppositorial solid pharmaceutical formulations, decanting or topical applications during surgery, aerosol delivery. Such methods are known in the art. Polypeptides may be administered as part of a Therapeutic, described in more detail below. Methods of delivering polynucleotides are described in more detail herein.

[0567] Wound Healing and Epithelial Cell Proliferation

[0568] In accordance with yet a further aspect of the present invention, there is provided a process for utilizing polynucleotides or polypeptides, as well as agonists or antagonists of the present invention, for therapeutic purposes, for example, to stimulate epithelial cell proliferation and basal keratinocytes for the purpose of wound healing, and to stimulate hair follicle production and healing of dermal wounds. Polynucleotides or polypeptides, as well as agonists or antagonists of the present invention, may be clinically useful in stimulating wound healing including surgical wounds, excisional wounds, deep wounds involving damage of the dermis and epidermis, eye tissue wounds, dental tissue wounds, oral cavity wounds, diabetic ulcers, dermal ulcers, cubitus ulcers, arterial ulcers, venous stasis ulcers, burns resulting from heat exposure or chemicals, and other abnormal wound healing conditions such as uremia, malnutrition, vitamin deficiencies and complications associated with systemic treatment with steroids, radiation therapy and antineoplastic drugs and antimetabolites. Polynucleotides or polypeptides, as well as agonists or antagonists of the present invention, could be used to promote dermal reestablishment subsequent to dermal loss

[0569] Polynucleotides or polypeptides, as well as agonists or antagonists of the present invention, could be used to increase the adherence of skin grafts to a wound bed and to stimulate re-epithelialization from the wound bed. The following are types of grafts that polynucleotides or polypeptides, agonists or antagonists of the present invention, could be used to increase adherence to a wound bed: autografts, artificial skin, allografts, autodermic graft, autoepdermic grafts, avacular grafts, Blair-Brown grafts, bone graft, brephoplastic grafts, cutis graft, delayed graft, dermic graft, epidermic graft, fascia graft, full thickness graft, heterologous graft, xenograft, homologous graft, hyperplastic graft, lamellar graft, mesh graft, mucosal graft, Ollier-Thiersch graft, omenpal graft, patch graft, pedicle graft, penetrating graft, split skin graft, thick split graft. Polynucleotides or polypeptides, as well as agonists or antagonists of the present invention, can be used to promote skin strength and to improve the appearance of aged skin.

[0570] It is believed that polynucleotides or polypeptides, as well as agonists or antagonists of the present invention, will also produce changes in hepatocyte proliferation, and epithelial cell proliferation in the lung, breast, pancreas, stomach, small intestine, and large intestine. Polynucleotides or polypeptides, as well as agonists or antagonists of the present invention, could promote proliferation of epithelial cells such as sebocytes, hair follicles, hepatocytes, type II pneumocytes, mucin-producing goblet cells, and other epithelial cells and their progenitors contained within the skin, lung, liver, and gastrointestinal tract. Polynucleotides or polypeptides, agonists or antagonists of the present invention, may promote proliferation of endothelial cells, keratinocytes, and basal keratinocytes.

[0571] Polynucleotides or polypeptides, as well as agonists or antagonists of the present invention, could also be used to reduce the side effects of gut toxicity that result from radiation, chemotherapy treatments or viral infections. Polynucleotides or polypeptides, as well as agonists or antagonists of the present invention, may have a cytoprotective effect on the small intestine mucosa. Polynucleotides or polypeptides, as well as agonists or antagonists of the present invention, may also stimulate healing of mucositis (mouth ulcers) that result from chemotherapy and viral infections.

[0572] Polynucleotides or polypeptides, as well as agonists or antagonists of the present invention, could further be used in full regeneration of skin in full and partial thickness skin defects, including burns, (i.e., repopulation of hair follicles, sweat glands, and sebaceous glands), treatment of other skin defects such as psoriasis. Polynucleotides or polypeptides, as well as agonists or antagonists of the present invention, could be used to treat epidermolysis bullosa, a defect in adherence of the epidermis to the underlying dermis which results in frequent, open and painful blisters by accelerating reepithelialization of these lesions. Polynucleotides or polypeptides, as well as agonists or antagonists of the present invention, could also be used to treat gastric and doudenal ulcers and help heal by scar formation of the mucosal lining and regeneration of glandular mucosa and duodenal mucosal lining more rapidly. Inflammatory bowel diseases, such as Crohn's disease and ulcerative colitis, are diseases which result in destruction of the mucosal surface of the small or large intestine, respectively. Thus, polynucleotides or polypeptides, as well as agonists or antagonists of the present invention, could be used to promote the resurfacing of the mucosal surface to aid more rapid healing and to prevent progression of inflammatory bowel disease. Treatment with polynucleotides or polypeptides, agonists or antagonists of the present invention, is expected to have a significant effect on the production of mucus throughout the gastrointestinal tract and could be used to protect the intestinal mucosa from injurious substances that are ingested or following surgery. Polynucleotides or polypeptides, as well as agonists or antagonists of the present invention, could be used to treat diseases associate with the under expression.

[0573] Moreover, polynucleotides or polypeptides, as well as agonists or antagonists of the present invention, could be used to prevent and heal damage to the lungs due to various pathological states. Polynucleotides or polypeptides, as well as agonists or antagonists of the present invention, which could stimulate proliferation and differentiation and promote the repair of alveoli and brochiolar epithelium to prevent or treat acute or chronic lung damage. For example, emphysema, which results in the progressive loss of aveoli, and inhalation injuries, i.e., resulting from smoke inhalation and burns, that cause necrosis of the bronchiolar epithelium and alveoli could be effectively treated using polynucleotides or polypeptides, agonists or antagonists of the present invention. Also, polynucleotides or polypeptides, as well as agonists or antagonists of the present invention, could be used to stimulate the proliferation of and differentiation of type II pneumocytes, which may help treat or prevent disease such as hyaline membrane diseases, such as infant respiratory distress syndrome and bronchopulmonary displasia, in premature infants.

[0574] Polynucleotides or polypeptides, as well as agonists or antagonists of the present invention, could stimulate the proliferation and differentiation of hepatocytes and, thus, could be used to alleviate or treat liver diseases and pathologies such as fulminant liver failure caused by cirrhosis, liver damage caused by viral hepatitis and toxic substances (i.e., acetaminophen, carbon tetraholoride and other hepatotoxins known in the art).

[0575] In addition, polynucleotides or polypeptides, as well as agonists or antagonists of the present invention, could be used treat or prevent the onset of diabetes mellitus. In patients with newly diagnosed Types I and II diabetes, where some islet cell function remains, polynucleotides or polypeptides, as well as agonists or antagonists of the present invention, could be used to maintain the islet function so as to alleviate, delay or prevent permanent manifestation of the disease. Also, polynucleotides or polypeptides, as well as agonists or antagonists of the present invention, could be used as an auxiliary in islet cell transplantation to improve or promote islet cell function.

[0576] Endocrine Disorders

[0577] Polynucleotides or polypeptides, or agonists or antagonists of the present invention, may be used to detect, prevent, diagnose, prognosticate, treat, and/or ameliorate disorders and/or diseases related to hormone imbalance, and/or disorders or diseases of the endocrine system.

[0578] Hormones secreted by the glands of the endocrine system control physical growth, sexual function, metabolism, and other functions. Disorders may be classified in two ways: disturbances in the production of hormones, and the inability of tissues to respond to hormones. The etiology of these hormone imbalance or endocrine system diseases, disorders or conditions may be genetic, somatic, such as cancer and some autoimmune diseases, acquired (e.g., by chemotherapy, injury or toxins), or infectious. Moreover, polynucleotides, polypeptides, antibodies, and/or agonists or antagonists of the present invention can be used as a marker or detector of a particular disease or disorder related to the endocrine system and/or hormone imbalance.

[0579] Endocrine system and/or hormone imbalance and/or diseases encompass disorders of uterine motility including, but not limited to: complications with pregnancy and labor (e.g., pre-term labor, post-term pregnancy, spontaneous abortion, and slow or stopped labor); and disorders and/or diseases of the menstrual cycle (e.g., dysmenorrhea and endometriosis).

[0580] Endocrine system and/or hormone imbalance disorders and/or diseases include disorders and/or diseases of the pancreas, such as, for example, diabetes mellitus, diabetes insipidus, congenital pancreatic agenesis, pheochromocytoma—islet cell tumor syndrome; disorders and/or diseases of the adrenal glands such as, for example, Addison's Disease, corticosteroid deficiency, virilizing disease, hirsutism, Cushing's Syndrome, hyperaldosteronism, pheochromocytoma; disorders and/or diseases of the pituitary gland, such as, for example, hyperpituitarism, hypopituitarism, pituitary dwarfism, pituitary adenoma, panhypopituitarism, acromegaly, gigantism; disorders and/or diseases of the thyroid, including but not limited to, hyperthyroidism, hypothyroidism, Plummer's disease, Graves' disease (toxic diffuse goiter), toxic nodular goiter, thyroiditis (Hashimoto's thyroiditis, subacute granulomatous thyroiditis, and silent lymphocytic thyroiditis), Pendred's syndrome, myxedema, cretinism, thyrotoxicosis, thyroid hormone coupling defect, thymic aplasia, Hurthle cell tumours of the thyroid, thyroid cancer, thyroid carcinoma, Medullary thyroid carcinoma; disorders and/or diseases of the parathyroid, such as, for example, hyperparathyroidism, hypoparathyroidism; disorders and/or diseases of the hypothalamus.

[0581] In addition, endocrine system and/or hormone imbalance disorders and/or diseases may also include disorders and/or diseases of the testes or ovaries, including cancer. Other disorders and/or diseases of the testes or ovaries further include, for example, ovarian cancer, polycystic ovary syndrome, Klinefelter's syndrome, vanishing testes syndrome (bilateral anorchia), congenital absence of Leydig's cells, cryptorchidism, Noonan's syndrome, myotonic dystrophy, capillary haemangioma of the testis (benign), neoplasias of the testis and neo-testis.

[0582] Moreover, endocrine system and/or hormone imbalance disorders and/or diseases may also include disorders and/or diseases such as, for example, polyglandular deficiency syndromes, pheochromocytoma, neuroblastoma, multiple Endocrine neoplasia, and disorders and/or cancers of endocrine tissues.

[0583] In another embodiment, a polypeptide of the invention, or polynucleotides, antibodies, agonists, or antagonists corresponding to that polypeptide, may be used to detect, prevent, diagnose, prognosticate, treat, and/or ameliorate endocrine diseases and/or disorders associated with the tissue(s) in which the polypeptide of the invention is expressed, including one, two, three, four, five, or more tissues disclosed in Table 1B.2, column 5 (Tissue Distribution Library Code).

[0584] Reproductive System Disorders

[0585] The polynucleotides or polypeptides, or agonists or antagonists of the invention may be used for the detection, prevention, diagnosis, prognostication, treatment, and/or amelioration of diseases and/or disorders of the reproductive system. Reproductive system disorders that can be treated by the compositions of the invention, include, but are not limited to, reproductive system injuries, infections, neoplastic disorders, congenital defects, and diseases or disorders which result in infertility, complications with pregnancy, labor, or parturition, and postpartum difficulties.

[0586] Reproductive system disorders and/or diseases include diseases and/or disorders of the testes, including testicular atrophy, testicular feminization, cryptorchism (unilateral and bilateral), anorchia, ectopic testis, epididymitis and orchitis (typically resulting from infections such as, for example, gonorrhea, mumps, tuberculosis, and syphilis), testicular torsion, vasitis nodosa, germ cell tumors (e.g., seminomas, embryonal cell carcinomas, teratocarcinomas, choriocarcinomas, yolk sac tumors, and teratomas), stromal tumors (e.g., Leydig cell tumors), hydrocele, hematocele, varicocele, spermatocele, inguinal hernia, and disorders of sperm production (e.g., immotile cilia syndrome, aspermia, asthenozoospermia, azoospermia, oligospermia, and teratozoospermia).

[0587] Reproductive system disorders also include disorders of the prostate gland, such as acute non-bacterial prostatitis, chronic non-bacterial prostatitis, acute bacterial prostatitis, chronic bacterial prostatitis, prostatodystonia, prostatosis, granulomatous prostatitis, malacoplakia, benign prostatic hypertrophy or hyperplasia, and prostate neoplastic disorders, including adenocarcinomas, transitional cell carcinomas, ductal carcinomas, and squamous cell carcinomas.

[0588] Additionally, the compositions of the invention may be useful in the detection, prevention, diagnosis, prognostication, treatment, and/or amelioration of disorders or diseases of the penis and urethra, including inflammatory disorders, such as balanoposthitis, balanitis xerotica obliterans, phimosis, paraphimosis, syphilis, herpes simplex virus, gonorrhea, non-gonococcal urethritis, chlamydia, mycoplasma, trichomonas, HIV, AIDS, Reiter's syndrome, condyloma acuminatum, condyloma latum, and pearly penile papules; urethral abnormalities, such as hypospadias, epispadias, and phimosis; premalignant lesions, including Erythroplasia of Queyrat, Bowen's disease, Bowenoid paplosis, giant condyloma of Buscke-Lowenstein, and varrucous carcinoma; penile cancers, including squamous cell carcinomas, carcinoma in situ, verrucous carcinoma, and disseminated penile carcinoma; urethral neoplastic disorders, including penile urethral carcinoma, bulbomembranous urethral carcinoma, and prostatic urethral carcinoma; and erectile disorders, such as priapism, Peyronie's disease, erectile dysfunction, and impotence.

[0589] Moreover, diseases and/or disorders of the vas deferens include vasculititis and CBAVD (congenital bilateral absence of the vas deferens); additionally, the polynucleotides, polypeptides, and agonists or antagonists of the present invention may be used in the detection, prevention, diagnosis, prognostication, treatment, and/or amelioration of diseases and disorders of the seminal vesicles, including hydatid disease, congenital chloride diarrhea, and polycystic kidney disease.

[0590] Other disorders and/or diseases of the male reproductive system include, for example, Klinefelter's syndrome, Young's syndrome, premature ejaculation, diabetes mellitus, cystic fibrosis, Kartagener's syndrome, high fever, multiple sclerosis, and gynecomastia.

[0591] Further, the polynucleotides, polypeptides, and agonists or antagonists of the present invention may be used in the detection, prevention, diagnosis, prognostication, treatment, and/or amelioration of diseases and/or disorders of the vagina and vulva, including bacterial vaginosis, candida vaginitis, herpes simplex virus, chancroid, granuloma inguinale, lymphogranuloma venereum, scabies, human papillomavirus, vaginal trauma, vulvar trauma, adenosis, chlamydia vaginitis, gonorrhea, trichomonas vaginitis, condyloma acuminatum, syphilis, molluscum contagiosum, atrophic vaginitis, Paget's disease, lichen sclerosus, lichen planus, vulvodynia, toxic shock syndrome, vaginismus, vulvovaginitis, vulvar vestibulitis, and neoplastic disorders, such as squamous cell hyperplasia, clear cell carcinoma, basal cell carcinoma, melanomas, cancer of Bartholin's gland, and vulvar intraepithelial neoplasia.

[0592] Disorders and/or diseases of the uterus include dysmenorrhea, retroverted uterus, endometriosis, fibroids, adenomyosis, anovulatory bleeding, amenorrhea, Cushing's syndrome, hydatidiform moles, Asherman's syndrome, premature menopause, precocious puberty, uterine polyps, dysfunctional uterine bleeding (e.g., due to aberrant hormonal signals), and neoplastic disorders, such as adenocarcinomas, keiomyosarcomas, and sarcomas. Additionally, the polypeptides, polynucleotides, or agonists or antagonists of the invention may be useful as a marker or detector of, as well as in the detection, prevention, diagnosis, prognostication, treatment, and/or amelioration of congenital uterine abnormalities, such as bicornuate uterus, septate uterus, simple unicornuate uterus, unicornuate uterus with a noncavitary rudimentary horn, unicornuate uterus with a non-communicating cavitary rudimentary horn, unicornuate uterus with a communicating cavitary horn, arcuate uterus, uterine didelfus, and T-shaped uterus.

[0593] Ovarian diseases and/or disorders include anovulation, polycystic ovary syndrome (Stein-Leventhal syndrome), ovarian cysts, ovarian hypofunction, ovarian insensitivity to gonadotropins, ovarian overproduction of androgens, right ovarian vein syndrome, amenorrhea, hirutism, and ovarian cancer (including, but not limited to, primary and secondary cancerous growth, Sertoli-Leydig tumors, endometriod carcinoma of the ovary, ovarian papillary serous adenocarcinoma, ovarian mucinous adenocarcinoma, and Ovarian Krukenberg tumors).

[0594] Cervical diseases and/or disorders include cervicitis, chronic cervicitis, mucopurulent cervicitis, cervical dysplasia, cervical polyps, Nabothian cysts, cervical erosion, cervical incompetence, and cervical neoplasms (including, for example, cervical carcinoma, squamous metaplasia, squamous cell carcinoma, adenosquamous cell neoplasia, and columnar cell neoplasia).

[0595] Additionally, diseases and/or disorders of the reproductive system include disorders and/or diseases of pregnancy, including miscarriage and stillbirth, such as early abortion, late abortion, spontaneous abortion, induced abortion, therapeutic abortion, threatened abortion, missed abortion, incomplete abortion, complete abortion, habitual abortion, missed abortion, and septic abortion; ectopic pregnancy, anemia, Rh incompatibility, vaginal bleeding during pregnancy, gestational diabetes, intrauterine growth retardation, polyhydramnios, HELLP syndrome, abruptio placentae, placenta previa, hyperemesis, preeclampsia, eclampsia, herpes gestationis, and urticaria of pregnancy. Additionally, the polynucleotides, polypeptides, and agonists or antagonists of the present invention may be used in the detection, prevention, diagnosis, prognostication, treatment, and/or amelioration of diseases that can complicate pregnancy, including heart disease, heart failure, rheumatic heart disease, congenital heart disease, mitral valve prolapse, high blood pressure, anemia, kidney disease, infectious disease (e.g., rubella, cytomegalovirus, toxoplasmosis, infectious hepatitis, chlamydia, HIV, AIDS, and genital herpes), diabetes mellitus, Graves' disease, thyroiditis, hypothyroidism, Hashimoto's thyroiditis, chronic active hepatitis, cirrhosis of the liver, primary biliary cirrhosis, asthma, systemic lupus eryematosis, rheumatoid arthritis, myasthenia gravis, idiopathic thrombocytopenic purpura, appendicitis, ovarian cysts, gallbladder disorders, and obstruction of the intestine.

[0596] Complications associated with labor and parturition include premature rupture of the membranes, pre-term labor, post-term pregnancy, postmaturity, labor that progresses too slowly, fetal distress (e.g., abnormal heart rate (fetal or maternal), breathing problems, and abnormal fetal position), shoulder dystocia, prolapsed umbilical cord, amniotic fluid embolism, and aberrant uterine bleeding.

[0597] Further, diseases and/or disorders of the postdelivery period, including endometritis, myometritis, parametritis, peritonitis, pelvic thrombophlebitis, pulmonary embolism, endotoxemia, pyelonephritis, saphenous thrombophlebitis, mastitis, cystitis, postpartum hemorrhage, and inverted uterus.

[0598] Other disorders and/or diseases of the female reproductive system that may be detected, prevented, diagnosed, prognosticated, treated, and/or ameliorated by the polynucleotides, polypeptides, and agonists or antagonists of the present invention include, for example, Turner's syndrome, pseudohermaphroditism, premenstrual syndrome, pelvic inflammatory disease, pelvic congestion (vascular engorgement), frigidity, anorgasmia, dyspareunia, ruptured fallopian tube, and Mittelschmerz.

[0599] Gastrointestinal Disorders

[0600] Polynucleotides or polypeptides, or agonists or antagonists of the present invention, may be used to detect, prevent, diagnose, prognosticate, treat, and/or ameliorate gastrointestinal diseases and disorders, including inflammatory diseases and/or conditions, infections, cancers (e.g., intestinal neoplasms (carcinoid tumor of the small intestine, non-Hodgkin's lymphoma of the small intestine, small bowl lymphoma)), and ulcers, such as peptic ulcers.

[0601] Gastrointestinal disorders include dysphagia, odynophagia, inflammation of the esophagus, peptic esophagitis, gastric reflux, submucosal fibrosis and stricturing, Mallory-Weiss lesions, leiomyomas, lipomas, epidermal cancers, adeoncarcinomas, gastric retention disorders, gastroenteritis, gastric atrophy, gastric/stomach cancers, polyps of the stomach, autoimmune disorders such as pernicious anemia, pyloric stenosis, gastritis (bacterial, viral, eosinophilic, stress-induced, chronic erosive, atrophic, plasma cell, and Ménétrier's), and peritoneal diseases (e.g., chyloperioneum, hemoperitoneum, mesenteric cyst, mesenteric lymphadenitis, mesenteric vascular occlusion, panniculitis, neoplasms, peritonitis, pneumoperitoneum, bubphrenic abscess,).

[0602] Gastrointestinal disorders also include disorders associated with the small intestine, such as malabsorption syndromes, distension, irritable bowel syndrome, sugar intolerance, celiac disease, duodenal ulcers, duodenitis, tropical sprue, Whipple's disease, intestinal lymphangiectasia, Crohn's disease, appendicitis, obstructions of the ileum, Meckel's diverticulum, multiple diverticula, failure of complete rotation of the small and large intestine, lymphoma, and bacterial and parasitic diseases (such as Traveler's diarrhea, typhoid and paratyphoid, cholera, infection by Roundworms (Ascariasis lumbricoides), Hookworms (Ancylostoma duodenale), Threadworms (Enterobius vermicularis), Tapeworms (Taenia saginata, Echinococcus granulosus, Diphyllobothrium spp., and T. solium).

[0603] Liver diseases and/or disorders include intrahepatic cholestasis (alagille syndrome, biliary liver cirrhosis), fatty liver (alcoholic fatty liver, reye syndrome), hepatic vein thrombosis, hepatolentricular degeneration, hepatomegaly, hepatopulmonary syndrome, hepatorenal syndrome, portal hypertension (esophageal and gastric varices), liver abscess (amebic liver abscess), liver cirrhosis (alcoholic, biliary and experimental), alcoholic liver diseases (fatty liver, hepatitis, cirrhosis), parasitic (hepatic echinococcosis, fascioliasis, amebic liver abscess), jaundice (hemolytic, hepatocellular, and cholestatic), cholestasis, portal hypertension, liver enlargement, ascites, hepatitis (alcoholic hepatitis, animal hepatitis, chronic hepatitis (autoimmune, hepatitis B, hepatitis C, hepatitis D, drug induced), toxic hepatitis, viral human hepatitis (hepatitis A, hepatitis B, hepatitis C, hepatitis D, hepatitis E), Wilson's disease, granulomatous hepatitis, secondary biliary cirrhosis, hepatic encephalopathy, portal hypertension, varices, hepatic encephalopathy, primary biliary cirrhosis, primary sclerosing cholangitis, hepatocellular adenoma, hemangiomas, bile stones, liver failure (hepatic encephalopathy, acute liver failure), and liver neoplasms (angiomyolipoma, calcified liver metastases, cystic liver metastases, epithelial tumors, fibrolamellar hepatocarcinoma, focal nodular hyperplasia, hepatic adenoma, hepatobiliary cystadenoma, hepatoblastoma, hepatocellular carcinoma, hepatoma, liver cancer, liver hemangioendothelioma, mesenchymal hamartoma, mesenchymal tumors of liver, nodular regenerative hyperplasia, benign liver tumors (Hepatic cysts [Simple cysts, Polycystic liver disease, Hepatobiliary cystadenoma, Choledochal cyst], Mesenchymal tumors [Mesenchymal hamartoma, Infantile hemangioendothelioma, Hemangioma, Peliosis hepatis, Lipomas, Inflammatory pseudotumor, Miscellaneous], Epithelial tumors [Bile duct epithelium (Bile duct hamartoma, Bile duct adenoma), Hepatocyte (Adenoma, Focal nodular hyperplasia, Nodular regenerative hyperplasia)], malignant liver tumors [hepatocellular, hepatoblastoma, hepatocellular carcinoma, cholangiocellular, cholangiocarcinoma, cystadenocarcinoma, tumors of blood vessels, angiosarcoma, Karposi's sarcoma, hemangioendothelioma, other tumors, embryonal sarcoma, fibrosarcoma, leiomyosarcoma, rhabdomyosarcoma, carcinosarcoma, teratoma, carcinoid, squamous carcinoma, primary lymphoma]), peliosis hepatis, erythrohepatic porphyria, hepatic porphyria (acute intermittent porphyria, porphyria cutanea tarda), Zellweger syndrome).

[0604] Pancreatic diseases and/or disorders include acute pancreatitis, chronic pancreatitis (acute necrotizing pancreatitis, alcoholic pancreatitis), neoplasms (adenocarcinoma of the pancreas, cystadenocarcinoma, insulinoma, gastrinoma, and glucagonoma, cystic neoplasms, islet-cell tumors, pancreoblastoma), and other pancreatic diseases (e.g., cystic fibrosis, cyst (pancreatic pseudocyst, pancreatic fistula, insufficiency)).

[0605] Gallbladder diseases include gallstones (cholelithiasis and choledocholithiasis), postcholecystectomy syndrome, diverticulosis of the gallbladder, acute cholecystitis, chronic cholecystitis, bile duct tumors, and mucocele.

[0606] Diseases and/or disorders of the large intestine include antibiotic-associated colitis, diverticulitis, ulcerative colitis, acquired megacolon, abscesses, fungal and bacterial infections, anorectal disorders (e.g., fissures, hemorrhoids), colonic diseases (colitis, colonic neoplasms [colon cancer, adenomatous colon polyps (e.g., villous adenoma), colon carcinoma, colorectal cancer], colonic diverticulitis, colonic diverticulosis, megacolon [Hirschsprung disease, toxic megacolon]; sigmoid diseases [proctocolitis, sigmoin neoplasms]), constipation, Crohn's disease, diarrhea (infantile diarrhea, dysentery), duodenal diseases (duodenal neoplasms, duodenal obstruction, duodenal ulcer, duodenitis), enteritis (enterocolitis), HIV enteropathy, ileal diseases (ileal neoplasms, ileitis), immunoproliferative small intestinal disease, inflammatory bowel disease (ulcerative colitis, Crohn's disease), intestinal atresia, parasitic diseases (anisakiasis, balantidiasis, blastocystis infections, cryptosporidiosis, dientamoebiasis, amebic dysentery, giardiasis), intestinal fistula (rectal fistula), intestinal neoplasms (cecal neoplasms, colonic neoplasms, duodenal neoplasms, ileal neoplasms, intestinal polyps, jejunal neoplasms, rectal neoplasms), intestinal obstruction (afferent loop syndrome, duodenal obstruction, impacted feces, intestinal pseudo-obstruction [cecal volvulus], intussusception), intestinal perforation, intestinal polyps (colonic polyps, gardner syndrome, peutz-jeghers syndrome), jejunal diseases (jejunal neoplasms), malabsorption syndromes (blind loop syndrome, celiac disease, lactose intolerance, short bowl syndrome, tropical sprue, whipple's disease), mesenteric vascular occlusion, pneumatosis cystoides intestinalis, protein-losing enteropathies (intestinal lymphagiectasis), rectal diseases (anus diseases, fecal incontinence, hemorrhoids, proctitis, rectal fistula, rectal prolapse, rectocele), peptic ulcer (duodenal ulcer, peptic esophagitis, hemorrhage, perforation, stomach ulcer, Zollinger-Ellison syndrome), postgastrectomy syndromes (dumping syndrome), stomach diseases (e.g., achlorhydria, duodenogastric reflux (bile reflux), gastric antral vascular ectasia, gastric fistula, gastric outlet obstruction, gastritis (atrophic or hypertrophic), gastroparesis, stomach dilatation, stomach diverticulum, stomach neoplasms (gastric cancer, gastric polyps, gastric adenocarcinoma, hyperplastic gastric polyp), stomach rupture, stomach ulcer, stomach volvulus), tuberculosis, visceroptosis, vomiting (e.g., hematemesis, hyperemesis gravidarum, postoperative nausea and vomiting) and hemorrhagic colitis.

[0607] Further diseases and/or disorders of the gastrointestinal system include biliary tract diseases, such as, gastroschisis, fistula (e.g., biliary fistula, esophageal fistula, gastric fistula, intestinal fistula, pancreatic fistula), neoplasms (e.g., biliary tract neoplasms, esophageal neoplasms, such as adenocarcinoma of the esophagus, esophageal squamous cell carcinoma, gastrointestinal neoplasms, pancreatic neoplasms, such as adenocarcinoma of the pancreas, mucinous cystic neoplasm of the pancreas, pancreatic cystic neoplasms, pancreatoblastoma, and peritoneal neoplasms), esophageal disease (e.g., bullous diseases, candidiasis, glycogenic acanthosis, ulceration, barrett esophagus varices, atresia, cyst, diverticulum (e.g., Zenker's diverticulum), fistula (e.g., tracheoesophageal fistula), motility disorders (e.g., CREST syndrome, deglutition disorders, achalasia, spasm, gastroesophageal reflux), neoplasms, perforation (e.g., Boerhaave syndrome, Mallory-Weiss syndrome), stenosis, esophagitis, diaphragmatic hernia (e.g., hiatal hernia); gastrointestinal diseases, such as, gastroenteritis (e.g., cholera morbus, norwalk virus infection), hemorrhage (e.g., hematemesis, melena, peptic ulcer hemorrhage), stomach neoplasms (gastric cancer, gastric polyps, gastric adenocarcinoma, stomach cancer)), hernia (e.g., congenital diaphragmatic hernia, femoral hernia, inguinal hernia, obturator hernia, umbilical hernia, ventral hernia), and intestinal diseases (e.g., cecal diseases (appendicitis, cecal neoplasms)).

[0608] Chemotaxis

[0609] Polynucleotides or polypeptides, as well as agonists or antagonists of the present invention may have chemotaxis activity. A chemotaxic molecule attracts or mobilizes cells (e.g., monocytes, fibroblasts, neutrophils, T-cells, mast cells, eosinophils, epithelial and/or endothelial cells) to a particular site in the body, such as inflammation, infection, or site of hyperproliferation. The mobilized cells can then fight off and/or heal the particular trauma or abnormality.

[0610] Polynucleotides or polypeptides, as well as agonists or antagonists of the present invention may increase chemotaxic activity of particular cells. These chemotactic molecules can then be used to treat inflammation, infection, hyperproliferative disorders, or any immune system disorder by increasing the number of cells targeted to a particular location in the body. For example, chemotaxic molecules can be used to treat wounds and other trauma to tissues by attracting immune cells to the injured location. Chemotactic molecules of the present invention can also attract fibroblasts, which can be used to treat wounds.

[0611] It is also contemplated that polynucleotides or polypeptides, as well as agonists or antagonists of the present invention may inhibit chemotactic activity. These molecules could also be used to treat disorders. Thus, polynucleotides or polypeptides, as well as agonists or antagonists of the present invention could be used as an inhibitor of chemotaxis.

[0612] Binding Activity

[0613] A polypeptide of the present invention may be used to screen for molecules that bind to the polypeptide or for molecules to which the polypeptide binds. The binding of the polypeptide and the molecule may activate (agonist), increase, inhibit (antagonist), or decrease activity of the polypeptide or the molecule bound. Examples of such molecules include antibodies, oligonucleotides, proteins (e.g., receptors), or small molecules.

[0614] Preferably, the molecule is closely related to the natural ligand of the polypeptide, e.g., a fragment of the ligand, or a natural substrate, a ligand, a structural or functional mimetic. (See, Coligan et al., Current Protocols in Immunology 1(2):Chapter 5 (1991)). Similarly, the molecule can be closely related to the natural receptor to which the polypeptide binds, or at least, a fragment of the receptor capable of being bound by the polypeptide (e.g., active site). In either case, the molecule can be rationally designed using known techniques.

[0615] Preferably, the screening for these molecules involves producing appropriate cells which express the polypeptide. Preferred cells include cells from mammals, yeast, Drosophila, or E. coli. Cells expressing the polypeptide (or cell membrane containing the expressed polypeptide) are then preferably contacted with a test compound potentially containing the molecule to observe binding, stimulation, or inhibition of activity of either the polypeptide or the molecule.

[0616] The assay may simply test binding of a candidate compound to the polypeptide, wherein binding is detected by a label, or in an assay involving competition with a labeled competitor. Further, the assay may test whether the candidate compound results in a signal generated by binding to the polypeptide.

[0617] Alternatively, the assay can be carried out using cell-free preparations, polypeptide/molecule affixed to a solid support, chemical libraries, or natural product mixtures. The assay may also simply comprise the steps of mixing a candidate compound with a solution containing a polypeptide, measuring polypeptide/molecule activity or binding, and comparing the polypeptide/molecule activity or binding to a standard.

[0618] Preferably, an ELISA assay can measure polypeptide level or activity in a sample (e.g., biological sample) using a monoclonal or polyclonal antibody. The antibody can measure polypeptide level or activity by either binding, directly or indirectly, to the polypeptide or by competing with the polypeptide for a substrate.

[0619] Additionally, the receptor to which the polypeptide of the present invention binds can be identified by numerous methods known to those of skill in the art, for example, ligand panning and FACS sorting (Coligan, et al., Current Protocols in Immun., 1(2), Chapter 5, (1991)). For example, expression cloning is employed wherein polyadenylated RNA is prepared from a cell responsive to the polypeptides, for example, NIH13T3 cells which are known to contain multiple receptors for the FGF family proteins, and SC-3 cells, and a cDNA library created from this RNA is divided into pools and used to transfect COS cells or other cells that are not responsive to the polypeptides. Transfected cells which are grown on glass slides are exposed to the polypeptide of the present invention, after they have been labeled. The polypeptides can be labeled by a variety of means including iodination or inclusion of a recognition site for a site-specific protein kinase.

[0620] Following fixation and incubation, the slides are subjected to auto-radiographic analysis. Positive pools are identified and sub-pools are prepared and re-transfected using an iterative sub-pooling and re-screening process, eventually yielding a single clones that encodes the putative receptor.

[0621] As an alternative approach for receptor identification, the labeled polypeptides can be photoaffinity linked with cell membrane or extract preparations that express the receptor molecule. Cross-linked material is resolved by PAGE analysis and exposed to X-ray film. The labeled complex containing the receptors of the polypeptides can be excised, resolved into peptide fragments, and subjected to protein microsequencing. The amino acid sequence obtained from microsequencing would be used to design a set of degenerate oligonucleotide probes to screen a cDNA library to identify the genes encoding the putative receptors.

[0622] Moreover, the techniques of gene-shuffling, motif-shuffling, exon-shuffling, and/or codon-shuffling (collectively referred to as “DNA shuffling”) may be employed to modulate the activities of the polypeptide of the present invention thereby effectively generating agonists and antagonists of the polypeptide of the present invention. See generally, U.S. Pat. Nos. 5,605,793, 5,811,238, 5,830,721, 5,834,252, and 5,837,458, and Patten, P. A., et al, Curr. Opinion Biotechnol. 8:724-33 (1997); Harayama, S. Trends Biotechnol. 16(2):76-82 (1998); Hansson, L. O., et al., J. Mol. Biol. 287:265-76 (1999); and Lorenzo, M. M. and Blasco, R. Biotechniques 24(2):308-13 (1998); each of these patents and publications are hereby incorporated by reference). In one embodiment, alteration of polynucleotides and corresponding polypeptides may be achieved by DNA shuffling. DNA shuffling involves the assembly of two or more DNA segments into a desired molecule by homologous, or site-specific, recombination. In another embodiment, polynucleotides and corresponding polypeptides may be altered by being subjected to random mutagenesis by error-prone PCR, random nucleotide insertion or other methods prior to recombination. In another embodiment, one or more components, motifs, sections, parts, domains, fragments, etc., of the polypeptide of the present invention may be recombined with one or more components, motifs, sections, parts, domains, fragments, etc. of one or more heterologous molecules. In preferred embodiments, the heterologous molecules are family members. In further preferred embodiments, the heterologous molecule is a growth factor such as, for example, platelet-derived growth factor (PDGF), insulin-like growth factor (IGF-I), transforming growth factor (TGF)-alpha, epidermal growth factor (EGF), fibroblast growth factor (FGF), TGF-beta, bone morphogenetic protein (BMP)-2, BMP-4, BMP-5, BMP-6, BMP-7, activins A and B, decapentaplegic (dpp), 60A, OP-2, dorsalin, growth differentiation factors (GDFs), nodal, MIS, inhibin-alpha, TGF-beta1, TGF-beta2, TGF-beta3, TGF-beta5, and glial-derived neurotrophic factor (GDNF).

[0623] Other preferred fragments are biologically active fragments of the polypeptide of the present invention. Biologically active fragments are those exhibiting activity similar, but not necessarily identical, to an activity of the polypeptide of the present invention. The biological activity of the fragments may include an improved desired activity, or a decreased undesirable activity.

[0624] Additionally, this invention provides a method of screening compounds to identify those which modulate the action of the polypeptide of the present invention. An example of such an assay comprises combining a mammalian fibroblast cell, a the polypeptide of the present invention, the compound to be screened and ³[H] thymidine under cell culture conditions where the fibroblast cell would normally proliferate. A control assay may be performed in the absence of the compound to be screened and compared to the amount of fibroblast proliferation in the presence of the compound to determine if the compound stimulates proliferation by determining the uptake of ³[H] thymidine in each case. The amount of fibroblast cell proliferation is measured by liquid scintillation chromatography which measures the incorporation of ³[H] thymidine. Both agonist and antagonist compounds may be identified by this procedure.

[0625] In another method, a mammalian cell or membrane preparation expressing a receptor for a polypeptide of the present invention is incubated with a labeled polypeptide of the present invention in the presence of the compound. The ability of the compound to enhance or block this interaction could then be measured. Alternatively, the response of a known second messenger system following interaction of a compound to be screened and the receptor is measured and the ability of the compound to bind to the receptor and elicit a second messenger response is measured to determine if the compound is a potential agonist or antagonist. Such second messenger systems include but are not limited to, cAMP guanylate cyclase, ion channels or phosphoinositide hydrolysis.

[0626] All of these above assays can be used as diagnostic or prognostic markers. The molecules discovered using these assays can be used to treat disease or to bring about a particular result in a patient (e.g., blood vessel growth) by activating or inhibiting the polypeptide/molecule. Moreover, the assays can discover agents which may inhibit or enhance the production of the polypeptides of the invention from suitably manipulated cells or tissues.

[0627] Therefore, the invention includes a method of identifying compounds which bind to a polypeptide of the invention comprising the steps of: (a) incubating a candidate binding compound with a polypeptide of the present invention; and (b) determining if binding has occurred. Moreover, the invention includes a method of identifying agonists/antagonists comprising the steps of: (a) incubating a candidate compound with a polypeptide of the present invention, (b) assaying a biological activity, and (b) determining if a biological activity of the polypeptide has been altered.

[0628] Targeted Delivery

[0629] In another embodiment, the invention provides a method of delivering compositions to targeted cells expressing a receptor for a polypeptide of the invention, or cells expressing a cell bound form of a polypeptide of the invention.

[0630] As discussed herein, polypeptides or antibodies of the invention may be associated with heterologous polypeptides, heterologous nucleic acids, toxins, or prodrugs via hydrophobic, hydrophilic, ionic and/or covalent interactions. In one embodiment, the invention provides a method for the specific delivery of compositions of the invention to cells by administering polypeptides of the invention (including antibodies) that are associated with heterologous polypeptides or nucleic acids. In one example, the invention provides a method for delivering a therapeutic protein into the targeted cell. In another example, the invention provides a method for delivering a single stranded nucleic acid (e.g., antisense or ribozymes) or double stranded nucleic acid (e.g., DNA that can integrate into the cell's genome or replicate episomally and that can be transcribed) into the targeted cell.

[0631] In another embodiment, the invention provides a method for the specific destruction of cells (e.g., the destruction of tumor cells) by administering polypeptides of the invention (e.g., polypeptides of the invention or antibodies of the invention) in association with toxins or cytotoxic prodrugs.

[0632] By “toxin” is meant compounds that bind and activate endogenous cytotoxic effector systems, radioisotopes, holotoxins, modified toxins, catalytic subunits of toxins, or any molecules or enzymes not normally present in or on the surface of a cell that under defined conditions cause the cell's death. Toxins that may be used according to the methods of the invention include, but are not limited to, radioisotopes known in the art, compounds such as, for example, antibodies (or complement fixing containing portions thereof) that bind an inherent or induced endogenous cytotoxic effector system, thymidine kinase, endonuclease, RNAse, alpha toxin, ricin, abrin, Pseudomonas exotoxin A, diphtheria toxin, saporin, momordin, gelonin, pokeweed antiviral protein, alpha-sarcin and cholera toxin. By “cytotoxic prodrug” is meant a non-toxic compound that is converted by an enzyme, normally present in the cell, into a cytotoxic compound. Cytotoxic prodrugs that may be used according to the methods of the invention include, but are not limited to, glutamyl derivatives of benzoic acid mustard alkylating agent, phosphate derivatives of etoposide or mitomycin C, cytosine arabinoside, daunorubisin, and phenoxyacetamide derivatives of doxorubicin.

[0633] Drug Screening

[0634] Further contemplated is the use of the polypeptides of the present invention, or the polynucleotides encoding these polypeptides, to screen for molecules which modify the activities of the polypeptides of the present invention. Such a method would include contacting the polypeptide of the present invention with a selected compound(s) suspected of having antagonist or agonist activity, and assaying the activity of these polypeptides following binding.

[0635] This invention is particularly useful for screening therapeutic compounds by using the polypeptides of the present invention, or binding fragments thereof, in any of a variety of drug screening techniques. The polypeptide or fragment employed in such a test may be affixed to a solid support, expressed on a cell surface, free in solution, or located intracellularly. One method of drug screening utilizes eukaryotic or prokaryotic host cells which are stably transformed with recombinant nucleic acids expressing the polypeptide or fragment. Drugs are screened against such transformed cells in competitive binding assays. One may measure, for example, the formulation of complexes between the agent being tested and a polypeptide of the present invention.

[0636] Thus, the present invention provides methods of screening for drugs or any other agents which affect activities mediated by the polypeptides of the present invention. These methods comprise contacting such an agent with a polypeptide of the present invention or a fragment thereof and assaying for the presence of a complex between the agent and the polypeptide or a fragment thereof, by methods well known in the art. In such a competitive binding assay, the agents to screen are typically labeled. Following incubation, free agent is separated from that present in bound form, and the amount of free or uncomplexed label is a measure of the ability of a particular agent to bind to the polypeptides of the present invention.

[0637] Another technique for drug screening provides high throughput screening for compounds having suitable binding affinity to the polypeptides of the present invention, and is described in great detail in European Patent Application 84/03564, published on Sep. 13, 1984, which is incorporated herein by reference herein. Briefly stated, large numbers of different small peptide test compounds are synthesized on a solid substrate, such as plastic pins or some other surface. The peptide test compounds are reacted with polypeptides of the present invention and washed. Bound polypeptides are then detected by methods well known in the art. Purified polypeptides are coated directly onto plates for use in the aforementioned drug screening techniques. In addition, non-neutralizing antibodies may be used to capture the peptide and immobilize it on the solid support.

[0638] This invention also contemplates the use of competitive drug screening assays in which neutralizing antibodies capable of binding polypeptides of the present invention specifically compete with a test compound for binding to the polypeptides or fragments thereof. In this manner, the antibodies are used to detect the presence of any peptide which shares one or more antigenic epitopes with a polypeptide of the invention.

[0639] Antisense and Ribozyme (Antagonists)

[0640] In specific embodiments, antagonists according to the present invention are nucleic acids corresponding to the sequences contained in SEQ ID NO:X, or the complementary strand thereof, and/or to cDNA sequences contained in cDNA ATCC Deposit No:Z identified for example, in Table 1A and/or 1B. In one embodiment, antisense sequence is generated internally, by the organism, in another embodiment, the antisense sequence is separately administered (see, for example, O'Connor, J., Neurochem. 56:560 (1991). Oligodeoxynucleotides as Antisense Inhibitors of Gene Expression, CRC Press, Boca Raton, Fla. (1988). Antisense technology can be used to control gene expression through antisense DNA or RNA, or through triple-helix formation. Antisense techniques are discussed for example, in Okano, J., Neurochem. 56:560 (1991); Oligodeoxynucleotides as Antisense Inhibitors of Gene Expression, CRC Press, Boca Raton, Fla. (1988). Triple helix formation is discussed in, for instance, Lee et al., Nucleic Acids Research 6:3073 (1979); Cooney et al., Science 241:456 (1988); and Dervan et al., Science 251:1300 (1991). The methods are based on binding of a polynucleotide to a complementary DNA or RNA.

[0641] For example, the use of c-myc and c-myb antisense RNA constructs to inhibit the growth of the non-lymphocytic leukemia cell line HL-60 and other cell lines was previously described. (Wickstrom et al. (1988); Anfossi et al. (1989)). These experiments were performed in vitro by incubating cells with the oligoribonucleotide. A similar procedure for in vivo use is described in WO 91/15580. Briefly, a pair of oligonucleotides for a given antisense RNA is produced as follows: A sequence complimentary to the first 15 bases of the open reading frame is flanked by an EcoR1 site on the 5 end and a HindIII site on the 3 end. Next, the pair of oligonucleotides is heated at 90° C. for one minute and then annealed in 2× ligation buffer (20 mM TRIS HCl pH 7.5, 10 mM MgCl2, 10 MM dithiothreitol (DTT) and 0.2 mM ATP) and then ligated to the EcoR1/Hind III site of the retroviral vector PMV7 (WO 91/15580).

[0642] For example, the 5′ coding portion of a polynucleotide that encodes the polypeptide of the present invention may be used to design an antisense RNA oligonucleotide of from about 10 to 40 base pairs in length. A DNA oligonucleotide is designed to be complementary to a region of the gene involved in transcription thereby preventing transcription and the production of the receptor. The antisense RNA oligonucleotide hybridizes to the mRNA in vivo and blocks translation of the mRNA molecule into receptor polypeptide.

[0643] In one embodiment, the antisense nucleic acid of the invention is produced intracellularly by transcription from an exogenous sequence. For example, a vector or a portion thereof, is transcribed, producing an antisense nucleic acid (RNA) of the invention. Such a vector would contain a sequence encoding the antisense nucleic acid. Such a vector can remain episomal or become chromosomally integrated, as long as it can be transcribed to produce the desired antisense RNA. Such vectors can be constructed by recombinant DNA technology methods standard in the art. Vectors can be plasmid, viral, or others known in the art, used for replication and expression in vertebrate cells. Expression of the sequence encoding the polypeptide of the present invention or fragments thereof, can be by any promoter known in the art to act in vertebrate, preferably human cells. Such promoters can be inducible or constitutive. Such promoters include, but are not limited to, the SV40 early promoter region (Bernoist and Chambon, Nature 29:304-310 (1981), the promoter contained in the 3′ long terminal repeat of Rous sarcoma virus (Yamamoto et al., Cell 22:787-797 (1980), the herpes thymidine promoter (Wagner et al., Proc. Natl. Acad. Sci. U.S.A. 78:1441-1445 (1981), the regulatory sequences of the metallothionein gene (Brinster, et al., Nature 296:39-42 (1982)), etc.

[0644] The antisense nucleic acids of the invention comprise a sequence complementary to at least a portion of an RNA transcript of a gene of the present invention. However, absolute complementarity, although preferred, is not required. A sequence “complementary to at least a portion of an RNA,” referred to herein, means a sequence having sufficient complementarity to be able to hybridize with the RNA, forming a stable duplex; in the case of double stranded antisense nucleic acids, a single strand of the duplex DNA may thus be tested, or triplex formation may be assayed. The ability to hybridize will depend on both the degree of complementarity and the length of the antisense nucleic acid. Generally, the larger the hybridizing nucleic acid, the more base mismatches with a RNA it may contain and still form a stable duplex (or triplex as the case may be). One skilled in the art can ascertain a tolerable degree of mismatch by use of standard procedures to determine the melting point of the hybridized complex.

[0645] Oligonucleotides that are complementary to the 5′ end of the message, e.g., the 5′ untranslated sequence up to and including the AUG initiation codon, should work most efficiently at inhibiting translation. However, sequences complementary to the 3′ untranslated sequences of mRNAs have been shown to be effective at inhibiting translation of mRNAs as well. See generally, Wagner, R., 1994, Nature 372:333-335. Thus, oligonucleotides complementary to either the 5′- or 3′-non-translated, non-coding regions of polynucleotide sequences described herein could be used in an antisense approach to inhibit translation of endogenous mRNA. Oligonucleotides complementary to the 5′ untranslated region of the mRNA should include the complement of the AUG start codon. Antisense oligonucleotides complementary to mRNA coding regions are less efficient inhibitors of translation but could be used in accordance with the invention. Whether designed to hybridize to the 5′-, 3′- or coding region of mRNA of the present invention, antisense nucleic acids should be at least six nucleotides in length, and are preferably oligonucleotides ranging from 6 to about 50 nucleotides in length. In specific aspects the oligonucleotide is at least 10 nucleotides, at least 17 nucleotides, at least 25 nucleotides or at least 50 nucleotides.

[0646] The polynucleotides of the invention can be DNA or RNA or chimeric mixtures or derivatives or modified versions thereof, single-stranded or double-stranded. The oligonucleotide can be modified at the base moiety, sugar moiety, or phosphate backbone, for example, to improve stability of the molecule, hybridization, etc. The oligonucleotide may include other appended groups such as peptides (e.g., for targeting host cell receptors in vivo), or agents facilitating transport across the cell membrane (see, e.g., Letsinger et al., 1989, Proc. Natl. Acad. Sci. U.S.A. 86:6553-6556; Lemaitre et al., 1987, Proc. Natl. Acad. Sci. 84:648-652; PCT Publication No. WO88/09810, published Dec. 15, 1988) or the blood-brain barrier (see, e.g., PCT Publication No. WO89/10134, published Apr. 25, 1988), hybridization-triggered cleavage agents. (See, e.g., Krol et al., 1988, BioTechniques 6:958-976) or intercalating agents. (See, e.g., Zon, 1988, Pharm. Res. 5:539-549). To this end, the oligonucleotide may be conjugated to another molecule, e.g., a peptide, hybridization triggered cross-linking agent, transport agent, hybridization-triggered cleavage agent, etc.

[0647] The antisense oligonucleotide may comprise at least one modified base moiety which is selected from the group including, but not limited to, 5-fluorouracil, 5-bromouracil, 5-chlorouracil, 5-iodouracil, hypoxanthine, xantine, 4-acetylcytosine, 5-(carboxyhydroxylmethyl)uracil, 5-carboxymethylaminomethyl-2-thiouridine, 5-carboxymethylaminomethyluracil, dihydrouracil, beta-D-galactosylqueosine, inosine, N6-isopentenyladenine, 1-methylguanine, 1-methylinosine, 2,2-dimethylguanine, 2-methyladenine, 2-methylguanine, 3-methylcytosine, 5-methylcytosine, N6-adenine, 7-methylguanine, 5-methylaminomethyluracil, 5-methoxyaminomethyl-2-thiouracil, beta-D-mannosylqueosine, 5′-methoxycarboxymethyluracil, 5-methoxyuracil, 2-methylthio-N6-isopentenyladenine, uracil-5-oxyacetic acid (v), wybutoxosine, pseudouracil, queosine, 2-thiocytosine, 5-methyl-2-thiouracil, 2-thiouracil, 4-thiouracil, 5-methyluracil, uracil-5-oxyacetic acid methylester, uracil-5-oxyacetic acid (v), 5-methyl-2-thiouracil, 3-(3-amino-3-N-2-carboxypropyl)uracil, (acp3)w, and 2,6-diaminopurine.

[0648] The antisense oligonucleotide may also comprise at least one modified sugar moiety selected from the group including, but not limited to, arabinose, 2-fluoroarabinose, xylulose, and hexose.

[0649] In yet another embodiment, the antisense oligonucleotide comprises at least one modified phosphate backbone selected from the group including, but not limited to, a phosphorothioate, a phosphorodithioate, a phosphoramidothioate, a phosphoramidate, a phosphordiamidate, a methylphosphonate, an alkyl phosphotriester, and a formacetal or analog thereof.

[0650] In yet another embodiment, the antisense oligonucleotide is an a-anomeric oligonucleotide. An a-anomeric oligonucleotide forms specific double-stranded hybrids with complementary RNA in which, contrary to the usual b-units, the strands run parallel to each other (Gautier et al., 1987, Nucl. Acids Res. 15:6625-6641). The oligonucleotide is a 2′-0-methylribonucleotide (Inoue et al., 1987, Nucl. Acids Res. 15:6131-6148), or a chimeric RNA-DNA analogue (Inoue et al., 1987, FEBS Lett. 215:327-330).

[0651] Polynucleotides of the invention may be synthesized by standard methods known in the art, e.g. by use of an automated DNA synthesizer (such as are commercially available from Biosearch, Applied Biosystems, etc.). As examples, phosphorothioate oligonucleotides may be synthesized by the method of Stein et al. (1988, Nucl. Acids Res. 16:3209), methylphosphonate oligonucleotides can be prepared by use of controlled pore glass polymer supports (Sarin et al., 1988, Proc. Natl. Acad. Sci. U.S.A. 85:7448-7451), etc.

[0652] While antisense nucleotides complementary to the coding region sequence could be used, those complementary to the transcribed untranslated region are most preferred.

[0653] Potential antagonists according to the invention also include catalytic RNA, or a ribozyme (See, e.g., PCT International Publication WO 90/11364, published Oct. 4, 1990; Sarver et al, Science 247:1222-1225 (1990). While ribozymes that cleave mRNA at site specific recognition sequences can be used to destroy mRNAs, the use of hammerhead ribozymes is preferred. Hammerhead ribozymes cleave mRNAs at locations dictated by flanking regions that form complementary base pairs with the target mRNA. The sole requirement is that the target mRNA have the following sequence of two bases: 5′-UG-3′. The construction and production of hammerhead ribozymes is well known in the art and is described more fully in Haseloff and Gerlach, Nature 334:585-591 (1988). There are numerous potential hammerhead ribozyme cleavage sites within the nucleotide sequence of SEQ ID NO:X. Preferably, the ribozyme is engineered so that the cleavage recognition site is located near the 5′ end of the mRNA; i.e., to increase efficiency and minimize the intracellular accumulation of non-functional mRNA transcripts.

[0654] As in the antisense approach, the ribozymes of the invention can be composed of modified oligonucleotides (e.g., for improved stability, targeting, etc.) and should be delivered to cells which express in vivo. DNA constructs encoding the ribozyme may be introduced into the cell in the same manner as described above for the introduction of antisense encoding DNA. A preferred method of delivery involves using a DNA construct “encoding” the ribozyme under the control of a strong constitutive promoter, such as, for example, pol III or pol II promoter, so that transfected cells will produce sufficient quantities of the ribozyme to destroy endogenous messages and inhibit translation. Since ribozymes unlike antisense molecules, are catalytic, a lower intracellular concentration is required for efficiency.

[0655] Antagonist/agonist compounds may be employed to inhibit the cell growth and proliferation effects of the polypeptides of the present invention on neoplastic cells and tissues, i.e. stimulation of angiogenesis of tumors, and, therefore, retard or prevent abnormal cellular growth and proliferation, for example, in tumor formation or growth.

[0656] The antagonist/agonist may also be employed to prevent hyper-vascular diseases, and prevent the proliferation of epithelial lens cells after extracapsular cataract surgery. Prevention of the mitogenic activity of the polypeptides of the present invention may also be desirous in cases such as restenosis after balloon angioplasty.

[0657] The antagonist/agonist may also be employed to prevent the growth of scar tissue during wound healing.

[0658] The antagonist/agonist may also be employed to treat the diseases described herein.

[0659] Thus, the invention provides a method of treating disorders or diseases, including but not limited to the disorders or diseases listed throughout this application, associated with overexpression of a polynucleotide of the present invention by administering to a patient (a) an antisense molecule directed to the polynucleotide of the present invention, and/or (b) a ribozyme directed to the polynucleotide of the present invention.

[0660] Binding Peptides and Other Molecules

[0661] The invention also encompasses screening methods for identifying polypeptides and nonpolypeptides that bind polypeptides of the invention, and the binding molecules identified thereby. These binding molecules are useful, for example, as agonists and antagonists of the polypeptides of the invention. Such agonists and antagonists can be used, in accordance with the invention, in the therapeutic embodiments described in detail, below.

[0662] This method comprises the steps of:
[0663] contacting polypeptides of the invention with a plurality of molecules; and
[0664] identifying a molecule that binds the polypeptides of the invention.

[0665] The step of contacting the polypeptides of the invention with the plurality of molecules may be effected in a number of ways. For example, one may contemplate immobilizing the polypeptides on a solid support and bringing a solution of the plurality of molecules in contact with the immobilized polypeptides. Such a procedure would be akin to an affinity chromatographic process, with the affinity matrix being comprised of the immobilized polypeptides of the invention. The molecules having a selective affinity for the polypeptides can then be purified by affinity selection. The nature of the solid support, process for attachment of the polypeptides to the solid support, solvent, and conditions of the affinity isolation or selection are largely conventional and well known to those of ordinary skill in the art.

[0666] Alternatively, one may also separate a plurality of polypeptides into substantially separate fractions comprising a subset of or individual polypeptides. For instance, one can separate the plurality of polypeptides by gel electrophoresis, column chromatography, or like method known to those of ordinary skill for the separation of polypeptides. The individual polypeptides can also be produced by a transformed host cell in such a way as to be expressed on or about its outer surface (e.g., a recombinant phage). Individual isolates can then be “probed” by the polypeptides of the invention, optionally in the presence of an inducer should one be required for expression, to determine if any selective affinity interaction takes place between the polypeptides and the individual clone. Prior to contacting the polypeptides with each fraction comprising individual polypeptides, the polypeptides could first be transferred to a solid support for additional convenience. Such a solid support may simply be a piece of filter membrane, such as one made of nitrocellulose or nylon. In this manner, positive clones could be identified from a collection of transformed host cells of an expression library, which harbor a DNA construct encoding a polypeptide having a selective affinity for polypeptides of the invention. Furthermore, the amino acid sequence of the polypeptide having a selective affinity for the polypeptides of the invention can be determined directly by conventional means or the coding sequence of the DNA encoding the polypeptide can frequently be determined more conveniently. The primary sequence can then be deduced from the corresponding DNA sequence. If the amino acid sequence is to be determined from the polypeptide itself, one may use microsequencing techniques. The sequencing technique may include mass spectroscopy.

[0667] In certain situations, it may be desirable to wash away any unbound polypeptides from a mixture of the polypeptides of the invention and the plurality of polypeptides prior to attempting to determine or to detect the presence of a selective affinity interaction. Such a wash step may be particularly desirable when the polypeptides of the invention or the plurality of polypeptides are bound to a solid support.

[0668] The plurality of molecules provided according to this method may be provided by way of diversity libraries, such as random or combinatorial peptide or nonpeptide libraries which can be screened for molecules that specifically bind polypeptides of the invention. Many libraries are known in the art that can be used, e.g., chemically synthesized libraries, recombinant (e.g., phage display libraries), and in vitro translation-based libraries. Examples of chemically synthesized libraries are described in Fodor et al., 1991, Science 251:767-773; Houghten et al., 1991, Nature 354:84-86; Lam et al., 1991, Nature 354:82-84; Medynski, 1994, Bio/Technology 12:709-710; Gallop et al., 1994, J. Medicinal Chemistry 37(9):1233-1251; Ohlmeyer et al., 1993, Proc. Natl. Acad. Sci. USA 90:10922-10926; Erb et al., 1994, Proc. Natl. Acad. Sci. USA 91:11422-11426; Houghten et al., 1992, Biotechniques 13:412; Jayawickreme et al., 1994, Proc. Natl. Acad. Sci. USA 91:1614-1618; Salmon et al., 1993, Proc. Natl. Acad. Sci. USA 90:11708-11712; PCT Publication No. WO 93/20242; and Brenner and Lerner, 1992, Proc. Natl. Acad. Sci. USA 89:5381-5383.

[0669] Examples of phage display libraries are described in Scott and Smith, 1990, Science 249:386-390; Devlin et al., 1990, Science, 249:404-406; Christian, R. B., et al., 1992, J. Mol. Biol. 227:711-718); Lenstra, 1992, J. Immunol. Meth. 152:149-157; Kay et al., 1993, Gene 128:59-65; and PCT Publication No. WO 94/18318 dated Aug. 18, 1994.

[0670] In vitro translation-based libraries include but are not limited to those described in PCT Publication No. WO 91/05058 dated Apr. 18, 1991; and Mattheakis et al., 1994, Proc. Natl. Acad. Sci. USA 91:9022-9026.

[0671] By way of examples of nonpeptide libraries, a benzodiazepine library (see e.g., Bunin et al., 1994, Proc. Natl. Acad. Sci. USA 91:4708-4712) can be adapted for use. Peptoid libraries (Simon et al., 1992, Proc. Natl. Acad. Sci. USA 89:9367-9371) can also be used. Another example of a library that can be used, in which the amide functionalities in peptides have been permethylated to generate a chemically transformed combinatorial library, is described by Ostresh et al. (1994, Proc. Natl. Acad. Sci. USA 91:11138-11142).

[0672] The variety of non-peptide libraries that are useful in the present invention is great. For example, Ecker and Crooke, 1995, Bio/Technology 13:351-360 list benzodiazepines, hydantoins, piperazinediones, biphenyls, sugar analogs, beta-mercaptoketones, arylacetic acids, acylpiperidines, benzopyrans, cubanes, xanthines, aminimides, and oxazolones as among the chemical species that form the basis of various libraries.

[0673] Non-peptide libraries can be classified broadly into two types: decorated monomers and oligomers. Decorated monomer libraries employ a relatively simple scaffold structure upon which a variety functional groups is added. Often the scaffold will be a molecule with a known useful pharmacological activity. For example, the scaffold might be the benzodiazepine structure.

[0674] Non-peptide oligomer libraries utilize a large number of monomers that are assembled together in ways that create new shapes that depend on the order of the monomers. Among the monomer units that have been used are carbamates, pyrrolinones, and morpholinos. Peptoids, peptide-like oligomers in which the side chain is attached to the alpha amino group rather than the alpha carbon, form the basis of another version of non-peptide oligomer libraries. The first non-peptide oligomer libraries utilized a single type of monomer and thus contained a repeating backbone. Recent libraries have utilized more than one monomer, giving the libraries added flexibility.

[0675] Screening the libraries can be accomplished by any of a variety of commonly known methods. See, e.g., the following references, which disclose screening of peptide libraries: Parmley and Smith, 1989, Adv. Exp. Med. Biol. 251:215-218; Scott and Smith, 1990, Science 249:386-390; Fowlkes et al., 1992; BioTechniques 13:422-427; Oldenburg et al., 1992, Proc. Natl. Acad. Sci. USA 89:5393-5397; Yu et al., 1994, Cell 76:933-945; Staudt et al., 1988, Science 241:577-580; Bock et al., 1992, Nature 355:564-566; Tuerk et al., 1992, Proc. Natl. Acad. Sci. USA 89:6988-6992; Ellington et al., 1992, Nature 355:850-852; U.S. Pat. No. 5,096,815, U.S. Pat. No. 5,223,409, and U.S. Pat. No. 5,198,346, all to Ladner et al.; Rebar and Pabo, 1993, Science 263:671-673; and CT Publication No. WO 94/18318.

[0676] In a specific embodiment, screening to identify a molecule that binds polypeptides of the invention can be carried out by contacting the library members with polypeptides of the invention immobilized on a solid phase and harvesting those library members that bind to the polypeptides of the invention. Examples of such screening methods, termed “panning” techniques are described by way of example in Parmley and Smith, 1988, Gene 73:305-318; Fowlkes et al., 1992, BioTechniques 13:422-427; PCT Publication No. WO 94/18318; and in references cited herein.

[0677] In another embodiment, the two-hybrid system for selecting interacting proteins in yeast (Fields and Song, 1989, Nature 340:245-246; Chien et al., 1991, Proc. Natl. Acad. Sci. USA 88:9578-9582) can be used to identify molecules that specifically bind to polypeptides of the invention.

[0678] Where the binding molecule is a polypeptide, the polypeptide can be conveniently selected from any peptide library, including random peptide libraries, combinatorial peptide libraries, or biased peptide libraries. The term “biased” is used herein to mean that the method of generating the library is manipulated so as to restrict one or more parameters that govern the diversity of the resulting collection of molecules, in this case peptides.

[0679] Thus, a truly random peptide library would generate a collection of peptides in which the probability of finding a particular amino acid at a given position of the peptide is the same for all 20 amino acids. A bias can be introduced into the library, however, by specifying, for example, that a lysine occur every fifth amino acid or that positions 4, 8, and 9 of a decapeptide library be fixed to include only arginine. Clearly, many types of biases can be contemplated, and the present invention is not restricted to any particular bias. Furthermore, the present invention contemplates specific types of peptide libraries, such as phage displayed peptide libraries and those that utilize a DNA construct comprising a lambda phage vector with a DNA insert.

[0680] As mentioned above, in the case of a binding molecule that is a polypeptide, the polypeptide may have about 6 to less than about 60 amino acid residues, preferably about 6 to about 10 amino acid residues, and most preferably, about 6 to about 22 amino acids. In another embodiment, a binding polypeptide has in the range of 15-100 amino acids, or 20-50 amino acids.

[0681] The selected binding polypeptide can be obtained by chemical synthesis or recombinant expression.

[0682] Other Activities

[0683] A polypeptide, polynucleotide, agonist, or antagonist of the present invention, as a result of the ability to stimulate vascular endothelial cell growth, may be employed in treatment for stimulating re-vascularization of ischemic tissues due to various disease conditions such as thrombosis, arteriosclerosis, and other cardiovascular conditions. The polypeptide, polynucleotide, agonist, or antagonist of the present invention may also be employed to stimulate angiogenesis and limb regeneration, as discussed above.

[0684] A polypeptide, polynucleotide, agonist, or antagonist of the present invention may also be employed for treating wounds due to injuries, burns, post-operative tissue repair, and ulcers since they are mitogenic to various cells of different origins, such as fibroblast cells and skeletal muscle cells, and therefore, facilitate the repair or replacement of damaged or diseased tissue.

[0685] A polypeptide, polynucleotide, agonist, or antagonist of the present invention may also be employed stimulate neuronal growth and to treat and prevent neuronal damage which occurs in certain neuronal disorders or neuro-degenerative conditions such as Alzheimer's disease, Parkinson's disease, and AIDS-related complex. A polypeptide, polynucleotide, agonist, or antagonist of the present invention may have the ability to stimulate chondrocyte growth, therefore, they may be employed to enhance bone and periodontal regeneration and aid in tissue transplants or bone grafts.

[0686] A polypeptide, polynucleotide, agonist, or antagonist of the present invention may be also be employed to prevent skin aging due to sunburn by stimulating keratinocyte growth.

[0687] A polypeptide, polynucleotide, agonist, or antagonist of the present invention may also be employed for preventing hair loss, since FGF family members activate hair-forming cells and promotes melanocyte growth. Along the same lines, a polypeptide, polynucleotide, agonist, or antagonist of the present invention may be employed to stimulate growth and differentiation of hematopoietic cells and bone marrow cells when used in combination with other cytokines.

[0688] A polypeptide, polynucleotide, agonist, or antagonist of the present invention may also be employed to maintain organs before transplantation or for supporting cell culture of primary tissues. A polypeptide, polynucleotide, agonist, or antagonist of the present invention may also be employed for inducing tissue of mesodermal origin to differentiate in early embryos.

[0689] A polypeptide, polynucleotide, agonist, or antagonist of the present invention may also increase or decrease the differentiation or proliferation of embryonic stem cells, besides, as discussed above, hematopoietic lineage.

[0690] A polypeptide, polynucleotide, agonist, or antagonist of the present invention may also be used to modulate mammalian characteristics, such as body height, weight, hair color, eye color, skin, percentage of adipose tissue, pigmentation, size, and shape (e.g., cosmetic surgery). Similarly, a polypeptide, polynucleotide, agonist, or antagonist of the present invention may be used to modulate mammalian metabolism affecting catabolism, anabolism, processing, utilization, and storage of energy.

[0691] A polypeptide, polynucleotide, agonist, or antagonist of the present invention may be used to change a mammal's mental state or physical state by influencing biorhythms, caricadic rhythms, depression (including depressive disorders), tendency for violence, tolerance for pain, reproductive capabilities (preferably by Activin or Inhibin-like activity), hormonal or endocrine levels, appetite, libido, memory, stress, or other cognitive qualities.

[0692] A polypeptide, polynucleotide, agonist, or antagonist of the present invention may also be used as a food additive or preservative, such as to increase or decrease storage capabilities, fat content, lipid, protein, carbohydrate, vitamins, minerals, cofactors or other nutritional components.

[0693] The above-recited applications have uses in a wide variety of hosts. Such hosts include, but are not limited to, human, murine, rabbit, goat, guinea pig, camel, horse, mouse, rat, hamster, pig, micro-pig, chicken, goat, cow, sheep, dog, cat, non-human primate, and human. In specific embodiments, the host is a mouse, rabbit, goat, guinea pig, chicken, rat, hamster, pig, sheep, dog or cat. In preferred embodiments, the host is a mammal. In most preferred embodiments, the host is a human.

### Other Preferred Embodiments

[0694] Other preferred embodiments of the claimed invention include an isolated nucleic acid molecule comprising a nucleotide sequence which is at least 95% identical to a sequence of at least about 50 contiguous nucleotides in the nucleotide sequence of SEQ ID NO:X or the complementary strand thereto, the nucleotide sequence as defined in column 5 of Table 1B.1 or columns 8 and 9 of Table 2 or the complementary strand thereto, and/or cDNA contained in ATCC Deposit No:Z.

[0695] Also preferred is a nucleic acid molecule wherein said sequence of contiguous nucleotides is included in the nucleotide sequence of the portion of SEQ ID NO:X as defined in column 5, “ORF (From-To)”, in Table 1B.1.

[0696] Also preferred is a nucleic acid molecule wherein said sequence of contiguous nucleotides is included in the nucleotide sequence of the portion of SEQ ID NO:X as defined in columns 8 and 9, “NT From” and “NT To” respectively, in Table 2.

[0697] Also preferred is an isolated nucleic acid molecule comprising a nucleotide sequence which is at least 95% identical to a sequence of at least about 150 contiguous nucleotides in the nucleotide sequence of SEQ ID NO:X or the complementary strand thereto, the nucleotide sequence as defined in column 5 of Table 1B.1 or columns 8 and 9 of Table 2 or the complementary strand thereto, and/or cDNA contained in ATCC Deposit No:Z.

[0698] Further preferred is an isolated nucleic acid molecule comprising a nucleotide sequence which is at least 95% identical to a sequence of at least about 500 contiguous nucleotides in the nucleotide sequence of SEQ ID NO:X or the complementary strand thereto, the nucleotide sequence as defined in column 5 of Table 1B.1 or columns 8 and 9 of Table 2 or the complementary strand thereto, and/or cDNA contained in ATCC Deposit No:Z.

[0699] A further preferred embodiment is a nucleic acid molecule comprising a nucleotide sequence which is at least 95% identical to the nucleotide sequence of the portion of SEQ ID NO:X defined in column 5, “ORF (From-To)”, in Table 1B.1.

[0700] A further preferred embodiment is a nucleic acid molecule comprising a nucleotide sequence which is at least 95% identical to the nucleotide sequence of the portion of SEQ ID NO:X defined in columns 8 and 9, “NT From” and “NT To”, respectively, in Table 2.

[0701] A further preferred embodiment is an isolated nucleic acid molecule comprising a nucleotide sequence which is at least 95% identical to the complete nucleotide sequence of SEQ ID NO:X or the complementary strand thereto, the nucleotide sequence as defined in column 5 of Table 1B.1 or columns 8 and 9 of Table 2 or the complementary strand thereto, and/or cDNA contained in ATCC Deposit No:Z.

[0702] Also preferred is an isolated nucleic acid molecule which hybridizes under stringent hybridization conditions to a nucleic acid molecule comprising a nucleotide sequence of SEQ ID NO:X or the complementary strand thereto, the nucleotide sequence as defined in column 5 of Table 1B.1 or columns 8 and 9 of Table 2 or the complementary strand thereto, and/or cDNA contained in ATCC Deposit No:Z, wherein said nucleic acid molecule which hybridizes does not hybridize under stringent hybridization conditions to a nucleic acid molecule having a nucleotide sequence consisting of only A residues or of only T residues.

[0703] Also preferred is a composition of matter comprising a DNA molecule which comprises the cDNA contained in ATCC Deposit No:Z.

[0704] Also preferred is an isolated nucleic acid molecule comprising a nucleotide sequence which is at least 95% identical to a sequence of at least 50 contiguous nucleotides of the cDNA sequence contained in ATCC Deposit No:Z.

[0705] Also preferred is an isolated nucleic acid molecule, wherein said sequence of at least 50 contiguous nucleotides is included in the nucleotide sequence of an open reading frame sequence encoded by cDNA contained in ATCC Deposit No:Z.

[0706] Also preferred is an isolated nucleic acid molecule comprising a nucleotide sequence which is at least 95% identical to sequence of at least 150 contiguous nucleotides in the nucleotide sequence encoded by cDNA contained in ATCC Deposit No:Z.

[0707] A further preferred embodiment is an isolated nucleic acid molecule comprising a nucleotide sequence which is at least 95% identical to sequence of at least 500 contiguous nucleotides in the nucleotide sequence encoded by cDNA contained in ATCC Deposit No:Z.

[0708] A further preferred embodiment is an isolated nucleic acid molecule comprising a nucleotide sequence which is at least 95% identical to the complete nucleotide sequence encoded by cDNA contained in ATCC Deposit No:Z.

[0709] A further preferred embodiment is a method for detecting in a biological sample a nucleic acid molecule comprising a nucleotide sequence which is at least 95% identical to a sequence of at least 50 contiguous nucleotides in a sequence selected from the group consisting of: a nucleotide sequence of SEQ ID NO:X or the complementary strand thereto; the nucleotide sequence as defined in column 5 of Table 1B.1 or columns 8 and 9 of Table 2 or the complementary strand thereto; and a nucleotide sequence encoded by cDNA contained in ATCC Deposit No:Z; which method comprises a step of comparing a nucleotide sequence of at least one nucleic acid molecule in said sample with a sequence selected from said group and determining whether the sequence of said nucleic acid molecule in said sample is at least 95% identical to said selected sequence.

[0710] Also preferred is the above method wherein said step of comparing sequences comprises determining the extent of nucleic acid hybridization between nucleic acid molecules in said sample and a nucleic acid molecule comprising said sequence selected from said group. Similarly, also preferred is the above method wherein said step of comparing sequences is performed by comparing the nucleotide sequence determined from a nucleic acid molecule in said sample with said sequence selected from said group. The nucleic acid molecules can comprise DNA molecules or RNA molecules.

[0711] A further preferred embodiment is a method for identifying the species, tissue or cell type of a biological sample which method comprises a step of detecting nucleic acid molecules in said sample, if any, comprising a nucleotide sequence that is at least 95% identical to a sequence of at least 50 contiguous nucleotides in a sequence selected from the group consisting of: a nucleotide sequence of SEQ ID NO:X or the complementary strand thereto; the nucleotide sequence as defined in column 5 of Table 1B.1 or columns 8 and 9 of Table 2 or the complementary strand thereto; and a nucleotide sequence of the cDNA contained in ATCC Deposit No:Z.

[0712] The method for identifying the species, tissue or cell type of a biological sample can comprise a step of detecting nucleic acid molecules comprising a nucleotide sequence in a panel of at least two nucleotide sequences, wherein at least one sequence in said panel is at least 95% identical to a sequence of at least 50 contiguous nucleotides in a sequence selected from said group.

[0713] Also preferred is a method for diagnosing in a subject a pathological condition associated with abnormal structure or expression of a nucleotide sequence of SEQ ID NO:X or the complementary strand thereto; the nucleotide sequence as defined in column 5 of Table 1B.1 or columns 8 and 9 of Table 2 or the complementary strand thereto; or the cDNA contained in ATCC Deposit No:Z which encodes a protein, wherein the method comprises a step of detecting in a biological sample obtained from said subject nucleic acid molecules, if any, comprising a nucleotide sequence that is at least 95% identical to a sequence of at least 50 contiguous nucleotides in a sequence selected from the group consisting of: a nucleotide sequence of SEQ ID NO:X or the complementary strand thereto; the nucleotide sequence as defined in column 5 of Table 1B.1 or columns 8 and 9 of Table 2 or the complementary strand thereto; and a nucleotide sequence of cDNA contained in ATCC Deposit No:Z.

[0714] The method for diagnosing a pathological condition can comprise a step of detecting nucleic acid molecules comprising a nucleotide sequence in a panel of at least two nucleotide sequences, wherein at least one sequence in said panel is at least 95% identical to a sequence of at least 50 contiguous nucleotides in a sequence selected from said group.

[0715] Also preferred is a composition of matter comprising isolated nucleic acid molecules wherein the nucleotide sequences of said nucleic acid molecules comprise a panel of at least two nucleotide sequences, wherein at least one sequence in said panel is at least 95% identical to a sequence of at least 50 contiguous nucleotides in a sequence selected from the group consisting of: a nucleotide sequence of SEQ ID NO:X or the complementary strand thereto; the nucleotide sequence as defined in column 5 of Table 1B.1 or columns 8 and 9 of Table 2 or the complementary strand thereto; and a nucleotide sequence encoded by cDNA contained in ATCC Deposit No:Z. The nucleic acid molecules can comprise DNA molecules or RNA molecules.

[0716] Also preferred is a composition of matter comprising isolated nucleic acid molecules wherein the nucleotide sequences of said nucleic acid molecules comprise a DNA microarray or “chip” of at least 1, 2, 3, 4, 5, 6, 7, 8, 9, 10, 15, 20, 25, 30, 40, 50, 100, 150, 200, 250, 300, 500, 1000, 2000, 3000, or 4000 nucleotide sequences, wherein at least one sequence in said DNA microarray or “chip” is at least 95% identical to a sequence of at least 50 contiguous nucleotides in a sequence selected from the group consisting of: a nucleotide sequence of SEQ ID NO:X wherein X is any integer as defined in Table 1A and/or 1B; and a nucleotide sequence encoded by a human cDNA clone identified by a cDNA “Clone ID” in Table 1A and/or 1B.

[0717] Also preferred is an isolated polypeptide comprising an amino acid sequence at least 90% identical to a sequence of at least about 10 contiguous amino acids in the polypeptide sequence of SEQ ID NO:Y; a polypeptide encoded by SEQ ID NO:X or the complementary strand thereto; the polypeptide encoded by the nucleotide sequence as defined in columns 8 and 9 of Table 2; and/or a polypeptide encoded by cDNA contained in ATCC Deposit No:Z.

[0718] Also preferred is an isolated polypeptide comprising an amino acid sequence at least 95% identical to a sequence of at least about 30 contiguous amino acids in the amino acid sequence of SEQ ID NO:Y; a polypeptide encoded by SEQ ID NO:X or the complementary strand thereto; the polypeptide encoded by the nucleotide sequence as defined in columns 8 and 9 of Table 2; and/or a polypeptide encoded by cDNA contained in ATCC Deposit No:Z.

[0719] Further preferred is an isolated polypeptide comprising an amino acid sequence at least 95% identical to a sequence of at least about 100 contiguous amino acids in the amino acid sequence of SEQ ID NO:Y; a polypeptide encoded by SEQ ID NO:X or the complementary strand thereto; the polypeptide encoded by the nucleotide sequence as defined in columns 8 and 9 of Table 2; and/or a polypeptide encoded by cDNA contained in ATCC Deposit No:Z.

[0720] Further preferred is an isolated polypeptide comprising an amino acid sequence at least 95% identical to the complete amino acid sequence of SEQ ID NO:Y; a polypeptide encoded by SEQ ID NO:X or the complementary strand thereto; the polypeptide encoded by the nucleotide sequence as defined in columns 8 and 9 of Table 2; and/or a polypeptide encoded by cDNA contained in ATCC Deposit No:Z.

[0721] Further preferred is an isolated polypeptide comprising an amino acid sequence at least 90% identical to a sequence of at least about 10 contiguous amino acids in the complete amino acid sequence of a polypeptide encoded by contained in ATCC Deposit No:Z Also preferred is a polypeptide wherein said sequence of contiguous amino acids is included in the amino acid sequence of a portion of said polypeptide encoded by cDNA contained in ATCC Deposit No:Z; a polypeptide encoded by SEQ ID NO:X or the complementary strand thereto; the polypeptide encoded by the nucleotide sequence as defined in columns 8 and 9 of Table 2; and/or the polypeptide sequence of SEQ ID NO:Y.

[0722] Also preferred is an isolated polypeptide comprising an amino acid sequence at least 95% identical to a sequence of at least about 30 contiguous amino acids in the amino acid sequence of a polypeptide encoded by the cDNA contained in ATCC Deposit No:Z.

[0723] Also preferred is an isolated polypeptide comprising an amino acid sequence at least 95% identical to a sequence of at least about 100 contiguous amino acids in the amino acid sequence of a polypeptide encoded by cDNA contained in ATCC Deposit No:Z.

[0724] Also preferred is an isolated polypeptide comprising an amino acid sequence at least 95% identical to the amino acid sequence of a polypeptide encoded by the cDNA contained in ATCC Deposit No:Z.

[0725] Further preferred is an isolated antibody which binds specifically to a polypeptide comprising an amino acid sequence that is at least 90% identical to a sequence of at least 10 contiguous amino acids in a sequence selected from the group consisting of: a polypeptide sequence of SEQ ID NO:Y; a polypeptide encoded by SEQ ID NO:X or the complementary strand thereto; the polypeptide encoded by the nucleotide sequence as defined in columns 8 and 9 of Table 2; and a polypeptide encoded by the cDNA contained in ATCC Deposit No:Z.

[0726] Further preferred is a method for detecting in a biological sample a polypeptide comprising an amino acid sequence which is at least 90% identical to a sequence of at least 10 contiguous amino acids in a sequence selected from the group consisting of: a polypeptide sequence of SEQ ID NO:Y; a polypeptide encoded by SEQ ID NO:X or the complementary strand thereto; the polypeptide encoded by the nucleotide sequence as defined in columns 8 and 9 of Table 2; and a polypeptide encoded by the cDNA contained in ATCC Deposit No:Z; which method comprises a step of comparing an amino acid sequence of at least one polypeptide molecule in said sample with a sequence selected from said group and determining whether the sequence of said polypeptide molecule in said sample is at least 90% identical to said sequence of at least 10 contiguous amino acids.

[0727] Also preferred is the above method wherein said step of comparing an amino acid sequence of at least one polypeptide molecule in said sample with a sequence selected from said group comprises determining the extent of specific binding of polypeptides in said sample to an antibody which binds specifically to a polypeptide comprising an amino acid sequence that is at least 90% identical to a sequence of at least 10 contiguous amino acids in a sequence selected from the group consisting of: a polypeptide sequence of SEQ ID NO:Y; a polypeptide encoded by SEQ ID NO:X or the complementary strand thereto; the polypeptide encoded by the nucleotide sequence as defined in columns 8 and 9 of Table 2; and a polypeptide encoded by the cDNA contained in ATCC Deposit No:Z.

[0728] Also preferred is the above method wherein said step of comparing sequences is performed by comparing the amino acid sequence determined from a polypeptide molecule in said sample with said sequence selected from said group.

[0729] Also preferred is a method for identifying the species, tissue or cell type of a biological sample which method comprises a step of detecting polypeptide molecules in said sample, if any, comprising an amino acid sequence that is at least 90% identical to a sequence of at least 10 contiguous amino acids in a sequence selected from the group consisting of: polypeptide sequence of SEQ ID NO:Y; a polypeptide encoded by SEQ ID NO:X or the complementary strand thereto; the polypeptide encoded by the nucleotide sequence as defined in columns 8 and 9 of Table 2; and a polypeptide encoded by the cDNA contained in ATCC Deposit No:Z.

[0730] Also preferred is the above method for identifying the species, tissue or cell type of a biological sample, which method comprises a step of detecting polypeptide molecules comprising an amino acid sequence in a panel of at least two amino acid sequences, wherein at least one sequence in said panel is at least 90% identical to a sequence of at least 10 contiguous amino acids in a sequence selected from the above group.

[0731] Also preferred is a method for diagnosing in a subject a pathological condition associated with abnormal structure or expression of a nucleic acid sequence identified in Table 1A, 1B or Table 2 encoding a polypeptide, which method comprises a step of detecting in a biological sample obtained from said subject polypeptide molecules comprising an amino acid sequence in a panel of at least two amino acid sequences, wherein at least one sequence in said panel is at least 90% identical to a sequence of at least 10 contiguous amino acids in a sequence selected from the group consisting of: polypeptide sequence of SEQ ID NO:Y; a polypeptide encoded by SEQ ID NO:X or the complementary strand thereto; the polypeptide encoded by the nucleotide sequence as defined in columns 8 and 9 of Table 2; and a polypeptide encoded by the cDNA contained in ATCC Deposit No:Z.

[0732] In any of these methods, the step of detecting said polypeptide molecules includes using an antibody.

[0733] Also preferred is an isolated nucleic acid molecule comprising a nucleotide sequence which is at least 95% identical to a nucleotide sequence encoding a polypeptide wherein said polypeptide comprises an amino acid sequence that is at least 90% identical to a sequence of at least 10 contiguous amino acids in a sequence selected from the group consisting of: polypeptide sequence of SEQ ID NO:Y; a polypeptide encoded by SEQ ID NO:X or the complementary strand thereto; the polypeptide encoded by the nucleotide sequence as defined in columns 8 and 9 of Table 2; and a polypeptide encoded by the cDNA contained in ATCC Deposit No:Z.

[0734] Also preferred is an isolated nucleic acid molecule, wherein said nucleotide sequence encoding a polypeptide has been optimized for expression of said polypeptide in a prokaryotic host.

[0735] Also preferred is a polypeptide molecule, wherein said polypeptide comprises an amino acid sequence selected from the group consisting of: polypeptide sequence of SEQ ID NO:Y; a polypeptide encoded by SEQ ID NO:X or the complementary strand thereto; the polypeptide encoded by the nucleotide sequence as defined in columns 8 and 9 of Table 2; and a polypeptide encoded by the cDNA contained in ATCC Deposit No:Z.

[0736] Further preferred is a method of making a recombinant vector comprising inserting any of the above isolated nucleic acid molecule into a vector. Also preferred is the recombinant vector produced by this method. Also preferred is a method of making a recombinant host cell comprising introducing the vector into a host cell, as well as the recombinant host cell produced by this method.

[0737] Also preferred is a method of making an isolated polypeptide comprising culturing this recombinant host cell under conditions such that said polypeptide is expressed and recovering said polypeptide. Also preferred is this method of making an isolated polypeptide, wherein said recombinant host cell is a eukaryotic cell and said polypeptide is a human protein comprising an amino acid sequence selected from the group consisting of: polypeptide sequence of SEQ ID NO:Y; a polypeptide encoded by SEQ ID NO:X or the complementary strand thereto; the polypeptide encoded by the nucleotide sequence as defined in columns 8 and 9 of Table 2; and a polypeptide encoded by the cDNA contained in ATCC Deposit No:Z. The isolated polypeptide produced by this method is also preferred.

[0738] Also preferred is a method of treatment of an individual in need of an increased level of a protein activity, which method comprises administering to such an individual a Therapeutic comprising an amount of an isolated polypeptide, polynucleotide, immunogenic fragment or analogue thereof, binding agent, antibody, or antigen binding fragment of the claimed invention effective to increase the level of said protein activity in said individual.

[0739] Also preferred is a method of treatment of an individual in need of a decreased level of a protein activity, which method comprised administering to such an individual a Therapeutic comprising an amount of an isolated polypeptide, polynucleotide, immunogenic fragment or analogue thereof, binding agent, antibody, or antigen binding fragment of the claimed invention effective to decrease the level of said protein activity in said individual.

[0740] Also preferred is a method of treatment of an individual in need of a specific delivery of toxic compositions to diseased cells (e.g., tumors, leukemias or lymphomas), which method comprises administering to such an individual a Therapeutic comprising an amount of an isolated polypeptide of the invention, including, but not limited to a binding agent, or antibody of the claimed invention that are associated with toxin or cytotoxic prodrugs.

[0741] Having generally described the invention, the same will be more readily understood by reference to the following examples, which are provided by way of illustration and are not intended as limiting.

Description of Table 6

[0742] Table 6 summarizes some of the ATCC Deposits, Deposit dates, and ATCC designation numbers of deposits made with the ATCC in connection with the present application.

[0743] These deposits were made in addition to those described in the Table 1A.

TABLE 6

| ATCC Deposits | Deposit Date | ATCC Designation Number |
|---|---|---|
| LP01, LP02, LP03, LP04, | May-20-97 | 209059, 209060, 209061, |
| LP05, LP06, LP07, LP08, | | 209062, 209063, 209064, |
| LP09, LP10, LP11, | | 209065, 209066, |
| | | 209067, 209068, 209069 |
| LP12 | Jan-12-98 | 209579 |
| LP13 | Jan-12-98 | 209578 |
| LP14 | Jul-16-98 | 203067 |
| LP15 | Jul-16-98 | 203068 |
| LP16 | Feb-1-99 | 203609 |
| LP17 | Feb-1-99 | 203610 |
| LP20 | Nov-17-98 | 203485 |
| LP21 | Jun-18-99 | PTA-252 |
| LP22 | Jun-18-99 | PTA-253 |
| LP23 | Dec-22-99 | PTA-1081 |

### EXAMPLES

### Example 1

### Isolation of a Selected cDNA Clone From the Deposited Sample

[0744] Each ATCC Deposit No:Z is contained in a plasmid vector. Table 7 identifies the vectors used to construct the cDNA library from which each clone was isolated. In many cases, the vector used to construct the library is a phage vector from which a plasmid has been excised. The following correlates the related plasmid for each phage vector used in constructing the cDNA library. For example, where a particular clone is identified in Table 7 as being isolated in the vector “Lambda Zap,” the corresponding deposited clone is in “pBluescript.”

| Vector Used to Construct Library | Corresponding Deposited Plasmid |
|---|---|
| Lambda Zap | pBluescript (pBS) |
| Uni-Zap XR | pBluescript (pBS) |
| Zap Express | pBK |
| lafmid BA | plafmid BA |
| pSport1 | pSport1 |
| pCMVSport 2.0 | pCMVSport 2.0 |
| pCMVSport 3.0 | pCMVSport 3.0 |
| pCR ® 2.1 | pCR ® 2.1 |

[0745] Vectors Lambda Zap (U.S. Pat. Nos. 5,128,256 and 5,286,636), Uni-Zap XR (U.S. Pat. Nos. 5,128,256 and 5,286,636), Zap Express (U.S. Pat. Nos. 5,128,256 and 5,286,636), pBluescript (pBS) (Short, J. M. et al., Nucleic Acids Res. 16:7583-7600 (1988); Alting-Mees, M. A. and Short, J. M., Nucleic Acids Res. 17:9494 (1989)) and pBK (Alting-Mees, M. A. et al., Strategies 5:58-61 (1992)) are commercially available from Stratagene Cloning Systems, Inc., 11011 N. Torrey Pines Road, La Jolla, Calif., 92037. pBS contains an ampicillin resistance gene and pBK contains a neomycin resistance gene. Both can be transformed into E. coli strain XL-1 Blue, also available from Stratagene. pBS comes in 4 forms SK+, SK−, KS+ and KS. The S and K refers to the orientation of the polylinker to the T7 and T3 primer sequences which flank the polylinker region (“S” is for SacI and “K” is for KpnI which are the first sites on each respective end of the linker). “+” or “−” refer to the orientation of the fl origin of replication (“ori”), such that in one orientation, single stranded rescue initiated from the fl ori generates sense strand DNA and in the other, antisense.

[0746] Vectors pSport1, pCMVSport 2.0 and pCMVSport 3.0, were obtained from Life Technologies, Inc., P.O. Box 6009, Gaithersburg, Md. 20897. All Sport vectors contain an ampicillin resistance gene and may be transformed into E. coli strain DH10B, also available from Life Technologies. (See, for instance, Gruber, C. E., et al., Focus 15:59 (1993)). Vector lafmid BA (Bento Soares, Columbia University, NY) contains an ampicillin resistance gene and can be transformed into E. coli strain XL-1 Blue. Vector pCR®2.1, which is available from Invitrogen, 1600 Faraday Avenue, Carlsbad, Calif. 92008, contains an ampicillin resistance gene and may be transformed into E. coli strain DH10B, available from Life Technologies. (See, for instance, Clark, J. M., Nuc. Acids Res. 16:9677-9686 (1988) and Mead, D. et al., Bio/Technology 9: (1991)). Preferably, a polynucleotide of the present invention does not comprise the phage vector sequences identified for the particular clone in Table 7, as well as the corresponding plasmid vector sequences designated above.

[0747] The deposited material in the sample assigned the ATCC Deposit Number cited by reference to Table 1A, Table 2, Table 6 and Table 7 for any given cDNA clone also may contain one or more additional plasmids, each comprising a cDNA clone different from that given clone. Thus, deposits sharing the same ATCC Deposit Number contain at least a plasmid for each ATCC Deposit No:Z.

TABLE 7

| | | | ATCC |
|---|---|---|---|
| Libraries owned by Catalog | Catalog Description | Vector | Deposit |
| HUKA HUKB HUKC HUKD | Human Uterine Cancer | Lambda ZAP II | LP01 |
| HUKE HUKF HUKG | | | |
| HCNA HCNB | Human Colon | Lambda ZAP II | LP01 |
| HFFA | Human Fetal Brain, random | Lambda ZAP II | LP01 |
| | primed | | |
| HTWA | Resting T-Cell | Lambda ZAP II | LP01 |
| HBQA | Early Stage Human Brain, | Lambda ZAP II | LP01 |
| | random primed | | |
| HLMB HLMF HLMG HLMH | breast lymph node CDNA | Lambda ZAP II | LP01 |
| HLMI HLMJ HLMM HLMN | library | | |
| HCQA HCQB | human colon cancer | Lamda ZAP II | LP01 |
| HMEA HMEC HMED HMEE | Human Microvascular | Lambda ZAP II | LP01 |
| HMEF HMEG HMEI HMEJ | Endothelial Cells, fract. A | | |
| HMEK HMEL | | | |
| HUSA HUSC | Human Umbilical Vein | Lambda ZAP II | LP01 |
| | Endothelial Cells, fract. A | | |
| HLQA HLQB | Hepatocellular Tumor | Lambda ZAP II | LP01 |
| HHGA HHGB HHGC HHGD | Hemangiopericytoma | Lambda ZAP II | LP01 |
| HSDM | Human Striatum Depression, re- | Lambda ZAP II | LP01 |
| | rescue | | |
| HUSH | H Umbilical Vein Endothelial | Lambda ZAP II | LP01 |
| | Cells, frac A, re-excision | | |
| HSGS | Salivary gland, subtracted | Lambda ZAP II | LP01 |
| HFXA HFXB HFXC HFXD | Brain frontal cortex | Lambda ZAP II | LP01 |
| HFXE HFXF HFXG HFXH | | | |
| HPQA HPQB HPQC | PERM TF274 | Lambda ZAP II | LP01 |
| HFXJ HFXK | Brain Frontal Cortex, re-excision | Lambda ZAP II | LP01 |
| HCWA HCWB HCWC HCWD | CD34 positive cells (Cord | ZAP Express | LP02 |
| HCWE HCWF HCWG HCWH | Blood) | | |
| HCWI HCWJ HCWK | | | |
| HCUA HCUB HCUC | CD34 depleted Buffy Coat | ZAP Express | LP02 |
| | (Cord Blood) | | |
| HRSM | A-14 cell line | ZAP Express | LP02 |
| HRSA | A1-CELL LINE | ZAP Express | LP02 |
| HCUD HCUE HCUF HCUG | CD34 depleted Buffy Coat | ZAP Express | LP02 |
| HCUH HCUI | (Cord Blood), re-excision | | |
| HBXE HBXF HBXG | H. Whole Brain #2, re-excision | ZAP Express | LP02 |
| HRLM | L8 cell line | ZAP Express | LP02 |
| HBXA HBXB HBXC HBXD | Human Whole Brain #2 - Oligo | ZAP Express | LP02 |
| | dT >1.5 Kb | | |
| HUDA HUDB HUDC | Testes | ZAP Express | LP02 |
| HHTM HHTN HHTO | H. hypothalamus, frac A; re- | ZAP Express | LP02 |
| | excision | | |
| HHTL | H. hypothalamus, frac A | ZAP Express | LP02 |
| HASA HASD | Human Adult Spleen | Uni-ZAP XR | LP03 |
| HFKC HFKD HFKE HFKF | Human Fetal Kidney | Uni-ZAP XR | LP03 |
| HFKG | | | |
| HE8A HE8B HE8C HE8D | Human 8 Week Whole Embryo | Uni-ZAP XR | LP03 |
| HE8E HE8F HE8M HE8N | | | |
| HGBA HGBD HGBE HGBF | Human Gall Bladder | Uni-ZAP XR | LP03 |
| HGBG HGBH HGBI | | | |
| HLHA HLHB HLHC HLHD | Human Fetal Lung III | Uni-ZAP XR | LP03 |
| HLHE HLHF HLHG HLHH | | | |
| HLHQ | | | |
| HPMA HPMB HPMC HPMD | Human Placenta | Uni-ZAP XR | LP03 |
| HPME HPMF HPMG HPMH | | | |
| HPRA HPRB HPRC HPRD | Human Prostate | Uni-ZAP XR | LP03 |
| HSIA HSIC HSID HSIE | Human Adult Small Intestine | Uni-ZAP XR | LP03 |
| HTEA HTEB HTEC HTED | Human Testes | Uni-ZAP XR | LP03 |
| HTEE HTEF HTEG HTEH | | | |
| HTEI HTEJ HTEK | | | |
| HTPA HTPB HTPC HTPD | Human Pancreas Tumor | Uni-ZAP XR | LP03 |
| HTPE | | | |
| HTTA HTTB HTTC HTTD | Human Testes Tumor | Uni-ZAP XR | LP03 |
| HTTE HTTF | | | |
| HAPA HAPB HAPC HAPM | Human Adult Pulmonary | Uni-ZAP XR | LP03 |
| HETA HETB HETC HETD | Human Endometrial Tumor | Uni-ZAP XR | LP03 |
| HETE HETF HETG HETH | | | |
| HETI | | | |
| HHFB HHFC HHFD HHFE | Human Fetal Heart | Uni-ZAP XR | LP03 |
| HHFF HHFG HHFH HHFI | | | |
| HHPB HHPC HHPD HHPE | Human Hippocampus | Uni-ZAP XR | LP03 |
| HHPF HHPG HHPH | | | |
| HCE1 HCE2 HCE3 HCE4 | Human Cerebellum | Uni-ZAP XR | LP03 |
| HCE5 HCEB HCEC HCED | | | |
| HCEE HCEF HCEG | | | |
| HUVB HUVC HUVD HUVE | Human Umbilical Vein, Endo. | Uni-ZAP XR | LP03 |
| | remake | | |
| HSTA HSTB HSTC HSTD | Human Skin Tumor | Uni-ZAP XR | LP03 |
| HTAA HTAB HTAC HTAD | Human Activated T-Cells | Uni-ZAP XR | LP03 |
| HTAE | | | |
| HFEA HFEB HFEC | Human Fetal Epithelium (Skin) | Uni-ZAP XR | LP03 |
| HJPA HJPB HJPC HJPD | HUMAN JURKAT | Uni-ZAP XR | LP03 |
| | MEMBRANE BOUND | | |
| | POLYSOMES | | |
| HESA | Human epithelioid sarcoma | Uni-ZAP XR | LP03 |
| HLTA HLTB HLTC HLTD | Human T-Cell Lymphoma | Uni-ZAP XR | LP03 |
| HLTE HLTF | | | |
| HFTA HFTB HFTC HFTD | Human Fetal Dura Mater | Uni-ZAP XR | LP03 |
| HRDA HRDB HRDC HRDD | Human Rhabdomyosarcoma | Uni-ZAP XR | LP03 |
| HRDE HRDF | | | |
| HCAA HCAB HCAC | Cem cells cyclohexamide treated | Uni-ZAP XR | LP03 |
| HRGA HRGB HRGC HRGD | Raji Cells, cyclohexamide | Uni-ZAP XR | LP03 |
| | treated | | |
| HSUA HSUB HSUC HSUM | Supt Cells, cyclohexamide | Uni-ZAP XR | LP03 |
| | treated | | |
| HT4A HT4C HT4D | Activated T-Cells, 12 hrs. | Uni-ZAP XR | LP03 |
| HE9A HE9B HE9C HE9D | Nine Week Old Early Stage | Uni-ZAP XR | LP03 |
| HE9E HE9F HE9G HE9H | Human | | |
| HE9M HE9N | | | |
| HATA HATB HATC HATD | Human Adrenal Gland Tumor | Uni-ZAP XR | LP03 |
| HATE | | | |
| HT5A | Activated T-Cells, 24 hrs. | Uni-ZAP XR | LP03 |
| HFGA HFGM | Human Fetal Brain | Uni-ZAP XR | LP03 |
| HNEA HNEB HNEC HNED | Human Neutrophil | Uni-ZAP XR | LP03 |
| HNEE | | | |
| HBGB HBGD | Human Primary Breast Cancer | Uni-ZAP XR | LP03 |
| HBNA HBNB | Human Normal Breast | Uni-ZAP XR | LP03 |
| HCAS | Cem Cells, cyclohexamide | Uni-ZAP XR | LP03 |
| | treated, subtra | | |
| HHPS | Human Hippocampus, | pBS | LP03 |
| | subtracted | | |
| HKCS HKCU | Human Colon Cancer, | pBS | LP03 |
| | subtracted | | |
| HRGS | Raji cells, cyclohexamide | pBS | LP03 |
| | treated, subtracted | | |
| HSUT | Supt cells, cyclohexamide | pBS | LP03 |
| | treated, differentially expressed | | |
| HT4S | Activated T-Cells, 12 hrs, | Uni-ZAP XR | LP03 |
| | subtracted | | |
| HCDA HCDB HCDC HCDD | Human Chondrosarcoma | Uni-ZAP XR | LP03 |
| HCDE | | | |
| HOAA HOAB HOAC | Human Osteosarcoma | Uni-ZAP XR | LP03 |
| HTLA HTLB HTLC HTLD | Human adult testis, large inserts | Uni-ZAP XR | LP03 |
| HTLE HTLF | | | |
| HLMA HLMC HLMD | Breast Lymph node cDNA | Uni-ZAP KR | LP03 |
| | library | | |
| H6EA H6EB H6EC | HL-60, PMA 4H | Uni-ZAP XR | LP03 |
| HTXA HTXB HTXC HTXD | Activated T-Cell | Uni-ZAP XR | LP03 |
| HTXE HTXF HTXG HTXH | (12 hs)/Thiouridine labelledEco | | |
| HNFA HNFB HNFC HNFD | Human Neutrophil, Activated | Uni-ZAP XR | LP03 |
| HNFE HNFF HNFG HNFH | | | |
| HNFJ | | | |
| HTOB HTOC | HUMAN TONSILS, | Uni-ZAP XR | LP03 |
| | FRACTION 2 | | |
| HMGB | Human OB MG63 control | Uni-ZAP XR | LP03 |
| | fraction I | | |
| HOPB | Human OB HOS control fraction I | Uni-ZAP XR | LP03 |
| HORB | Human OB HOS treated (10 nM | Uni-ZAP XR | LP03 |
| | E2) fraction I | | |
| HSVA HSVB HSVC | Human Chronic Synovitis | Uni-ZAP XR | LP03 |
| HROA | HUMAN STOMACH | Uni-ZAP XR | LP03 |
| HBJA HBJB HBJC HBJD HBJE | HUMAN B CELL | Uni-ZAP XR | LP03 |
| HBJF HBJG HBJH HBJI HBJJ | LYMPHOMA | | |
| HBJK | | | |
| HCRA HCRB HCRC | human corpus colosum | Uni-ZAP XR | LP03 |
| HODA HODB HODC HODD | human ovarian cancer | Uni-ZAP XR | LP03 |
| HDSA | Dermatofibrosarcoma | Uni-ZAP XR | LP03 |
| | Protuberance | | |
| HMWA HMWB HMWC | Bone Marrow Cell Line | Uni-ZAP XR | LP03 |
| HMWD HMWE HMWF | (RS4; 11) | | |
| HMWG HMWH HMWI HMWJ | | | |
| HSOA | stomach cancer (human) | Uni-ZAP XR | LP03 |
| HERA | SKIN | Uni-ZAP XR | LP03 |
| HMDA | Brain-medulloblastoma | Uni-ZAP XR | LP03 |
| HGLA HGLB HGLD | Glioblastoma | Uni-ZAP XR | LP03 |
| HEAA | H. Atrophic Endometrium | Uni-ZAP XR | LP03 |
| HBCA HBCB | H. Lymph node breast Cancer | Uni-ZAP XR | LP03 |
| HPWT | Human Prostate BPH, re- | Uni-ZAP XR | LP03 |
| | excision | | |
| HFVG HFVH HFVI | Fetal Liver, subtraction II | pBS | LP03 |
| HNFI | Human Neutrophils, Activated, | pBS | LP03 |
| | re-excision | | |
| HBMB HBMC HBMD | Human Bone Marrow, re- | pBS | LP03 |
| | excision | | |
| HKML HKMM HKMN | H. Kidney Medulla, re-excision | pBS | LP03 |
| HKIX HKIY | H. Kidney Cortex, subtracted | pBS | LP03 |
| HADT | H. Amygdala Depression, | pBS | LP03 |
| | subtracted | | |
| H6AS | Hl-60, untreated, subtracted | Uni-ZAP XR | LP03 |
| H6ES | HL-60, PMA 4 H, subtracted | Uni-ZAP XR | LP03 |
| H6BS | HL-60, RA 4 h, Subtracted | Uni-ZAP XR | LP03 |
| H6CS | HL-60, PMA 1 d, subtracted | Uni-ZAP XR | LP03 |
| HTXJ HTXK | Activated T- | Uni-ZAP XR | LP03 |
| | cell(12 h)/Thiouridine-re- | | |
| | excision | | |
| HMSA HMSB HMSC HMSD | Monocyte activated | Uni-ZAP XR | LP03 |
| HMSE HMSF HMSG HMSH | | | |
| HMSI HMSJ HMSK | | | |
| HAGA HAGB HAGC HAGD | Human Amygdala | Uni-ZAP XR | LP03 |
| HAGE HAGF | | | |
| HSRA HSRB HSRE | STROMAL - | Uni-ZAP XR | LP03 |
| | OSTEOCLASTOMA | | |
| HSRD HSRF HSRG HSRH | Human Osteoclastoma Stromal | Uni-ZAP XR | LP03 |
| | Cells - unamplified | | |
| HSQA HSQB HSQC HSQD | Stromal cell TF274 | Uni-ZAP XR | LP03 |
| HSQE HSQF HSQG | | | |
| HSKA HSKB HSKC HSKD | Smooth muscle, serum treated | Uni-ZAP XR | LP03 |
| HSKE HSKF HSKZ | | | |
| HSLA HSLB HSLC HSLD | Smooth muscle, control | Uni-ZAP XR | LP03 |
| HSLE HSLF HSLG | | | |
| HSDA HSDD HSDE HSDF | Spinal cord | Uni-ZAP XR | LP03 |
| HSDG HSDH | | | |
| HPWS | Prostate-BPH subtracted II | pBS | LP03 |
| HSKW HSKX HSKY | Smooth Muscle- HASTE | pBS | LP03 |
| | normalized | | |
| HFPB HFPC HFPD | H. Frontal cortex, epileptic; re- | Uni-ZAP XR | LP03 |
| | excision | | |
| HSDI HSDJ HSDK | Spinal Cord, re-excision | Uni-ZAP XR | LP03 |
| HSKN HSKO | Smooth Muscle Serum Treated, | pBS | LP03 |
| | Norm | | |
| HSKG HSKH HSKI | Smooth muscle, serum | pBS | LP03 |
| | induced, re-exc | | |
| HFCA HFCB HFCC HFCD | Human Fetal Brain | Uni-ZAP XR | LP04 |
| HFCE HFCF | | | |
| HPTA HPTB HPTD | Human Pituitary | Uni-ZAP XR | LP04 |
| HTHB HTHC HTHD | Human Thymus | Uni-ZAP XR | LP04 |
| HE6B HE6C HE6D HE6E HE6F | Human Whole Six Week Old | Uni-ZAP XR | LP04 |
| HE6G HE6S | Embryo | | |
| HSSA HSSB HSSC HSSD | Human Synovial Sarcoma | Uni-ZAP XR | LP04 |
| HSSE HSSF HSSG HSSH HSSI | | | |
| HSSJ HSSK | | | |
| HE7T | 7 Week Old Early Stage Human, | Uni-ZAP XR | LP04 |
| | subtracted | | |
| HEPA HEPB HEPC | Human Epididymus | Uni-ZAP XR | LP04 |
| HSNA HSNB HSNC HSNM | Human Synovium | Uni-ZAP XR | LP04 |
| HSNN | | | |
| HPFB HPFC HPFD HPFE | Human Prostate Cancer, Stage C | Uni-ZAP XR | LP04 |
| | fraction | | |
| HE2A HE2D HE2E HE2H HE2I | 12 Week Old Early Stage | Uni-ZAP XR | LP04 |
| HE2M HE2N HE2O | Human | | |
| HE2B HE2C HE2F HE2G HE2P | 12 Week Old Early Stage | Uni-ZAP XR | LP04 |
| HE2Q | Human, II | | |
| HPTS HPTT HPTU | Human Pituitary, subtracted | Uni-ZAP XR | LP04 |
| HAUA HAUB HAUC | Amniotic Cells - TNF induced | Uni-ZAP XR | LP04 |
| HAQA HAQB HAQC HAQD | Amniotic Cells - Primary | Uni-ZAP XR | LP04 |
| | Culture | | |
| HWTA HWTB HWTC | wilm's tumor | Uni-ZAP XR | LP04 |
| HBSD | Bone Cancer, re-excision | Uni-ZAP XR | LP04 |
| HSGB | Salivary gland, re-excision | Uni-ZAP XR | LP04 |
| HSJA HSJB HSJC | Smooth muscle-ILb induced | Uni-ZAP XR | LP04 |
| HSXA HSXB HSXC HSXD | Human Substantia Nigra | Uni-ZAP XR | LP04 |
| HSHA HSHB HSHC | Smooth muscle, IL1b induced | Uni-ZAP XR | LP04 |
| HOUA HOUB HOUC HOUD | Adipocytes | Uni-ZAP XR | LP04 |
| HOUE | | | |
| HPWA HPWB HPWC HPWD | Prostate BPH | Uni-ZAP XR | LP04 |
| HPWE | | | |
| HELA HELB HELC HELD | Endothelial cells-control | Uni-ZAP XR | LP04 |
| HELE HELF HELG HELH | | | |
| HEMA HEMB HEMC HEMD | Endothelial-induced | Uni-ZAP XR | LP04 |
| HEME HEMF HEMG HEMH | | | |
| HBIA HBIB HBIC | Human Brain, Striatum | Uni-ZAP XR | LP04 |
| HHSA HHSB HHSC HHSD | Human | Uni-ZAP XR | LP04 |
| HHSE | Hypothalmus, Schizophrenia | | |
| HNGA HNGB HNGC HNGD | neutrophils control | Uni-ZAP XR | LP04 |
| HNGE HNGF HNGG HNGH | | | |
| HNGI HNGJ | | | |
| HNHA HNHB HNHC HNHD | Neutrophils IL-1 and LPS | Uni-ZAP XR | LP04 |
| HNHE HNHF HNHG HNHH | induced | | |
| HNHI HNHJ | | | |
| HSDB HSDC | STRIATUM DEPRESSION | Uni-ZAP XR | LP04 |
| HHPT | Hypothalamus | Uni-ZAP XR | LP04 |
| HSAT HSAU HSAV HSAW | Anergic T-cell | Uni-ZAP XR | LP04 |
| HSAX HSAY HSAZ | | | |
| HBMS HBMT HBMU HBMV | Bone marrow | Uni-ZAP XR | LP04 |
| HBMW HBMX | | | |
| HOEA HOEB HOEC HOED | Osteoblasts | Uni-ZAP XR | LP04 |
| HOEE HOEF HOEJ | | | |
| HAIA HAIB HAIC HAID HAIE | Epithelial-TNFa and INF | Uni-ZAP XR | LP04 |
| HAIF | induced | | |
| HTGA HTGB HTGC HTGD | Apoptotic T-cell | Uni-ZAP XR | LP04 |
| HMCA HMCB HMCC HMCD | Macrophage-oxLDL | Uni-ZAP XR | LP04 |
| HMCE | | | |
| HMAA HMAB HMAC HMAD | Macrophage (GM-CSF treated) | Uni-ZAP XR | LP04 |
| HMAE HMAF HMAG | | | |
| HPHA | Normal Prostate | Uni-ZAP XR | LP04 |
| HPIA HPIB HPIC | LNCAP prostate cell line | Uni-ZAP XR | LP04 |
| HPJA HPJB HPJC | PC3 Prostate cell line | Uni-ZAP XR | LP04 |
| HOSE HOSF HOSG | Human Osteoclastoma, re- | Uni-ZAP XR | LP04 |
| | excision | | |
| HTGE HTGF | Apoptotic T-cell, re-excision | Uni-ZAP XR | LP04 |
| HMAJ HMAK | H Macrophage (GM-CSF | Uni-ZAP XR | LP04 |
| | treated), re-excision | | |
| HACB HACC HACD | Human Adipose Tissue, re- | Uni-ZAP XR | LP04 |
| | excision | | |
| HFPA | H. Frontal Cortex, Epileptic | Uni-ZAP XR | LP04 |
| HFAA HFAB HFAC HFAD | Alzheimer's, spongy change | Uni-ZAP XR | LP04 |
| HFAE | | | |
| HFAM | Frontal Lobe, Dementia | Uni-ZAP XR | LP04 |
| HMIA HMIB HMIC | Human Manic Depression | Uni-ZAP XR | LP04 |
| | Tissue | | |
| HTSA HTSE HTSF HTSG | Human Thymus | pBS | LP05 |
| HTSH | | | |
| HPBA HPBB HPBC HPBD | Human Pineal Gland | pBS | LP05 |
| HPBE | | | |
| HSAA HSAB HSAC | HSA 172 Cells | pBS | LP05 |
| HSBA HSBB HSBC HSBM | HSC 172 cells | pBS | LP05 |
| HJAA HJAB HJAC HJAD | Jurkat T-cell G1 phase | pBS | LP05 |
| HJBA HJBB HJBC HJBD | Jurkat T-Cell, S phase | pBS | LP05 |
| HAFA HAFB | Aorta endothelial cells + TNF-a | pBS | LP05 |
| HAWA HAWB HAWC | Human White Adipose | pBS | LP05 |
| HTNA HTNB | Human Thyroid | pBS | LP05 |
| HONA | Normal Ovary, Premenopausal | pBS | LP05 |
| HARA HARB | Human Adult Retina | pBS | LP05 |
| HLJA HLJB | Human Lung | pCMVSport 1 | LP06 |
| HOFM HOFN HOFO | H. Ovarian Tumor, II, OV5232 | pCMVSport 2.0 | LP07 |
| HOGA HOGB HOGC | OV 10-3-95 | pCMVSport 2.0 | LP07 |
| HCGL | CD34+cells, II | pCMVSport 2.0 | LP07 |
| HDLA | Hodgkin's Lymphoma I | pCMVSport 2.0 | LP07 |
| HDTA HDTB HDTC HDTD | Hodgkin's Lymphoma II | pCMVSport 2.0 | LP07 |
| HDTE | | | |
| HKAA HKAB HKAC HKAD | Keratinocyte | pCMVSport 2.0 | LP07 |
| HKAE HKAF HKAG HKAH | | | |
| HCIM | CAPFINDER, Crohn's Disease, | pCMVSport 2.0 | LP07 |
| | lib 2 | | |
| HKAL | Keratinocyte, lib 2 | pCMVSport2.0 | LP07 |
| HKAT | Keratinocyte, lib 3 | pCMVSport2.0 | LP07 |
| HNDA | Nasal polyps | pCMVSport2.0 | LP07 |
| HDRA | H. Primary Dendritic Cells, lib 3 | pCMVSport2.0 | LP07 |
| HOHA HOHB HOHC | Human Osteoblasts II | pCMVSport2.0 | LP07 |
| HLDA HLDB HLDC | Liver, Hepatoma | pCMVSport3.0 | LP08 |
| HLDN HLDO HLDP | Human Liver, normal | pCMVSport3.0 | LP08 |
| HMTA | pBMC stimulated w/poly I/C | pCMVSport3.0 | LP08 |
| HNTA | NTERA2, control | pCMVSport3.0 | LP08 |
| HDPA HDPB HDPC HDPD | Primary Dendritic Cells, lib 1 | pCMVSport3.0 | LP08 |
| HDPF HDPG HDPH HDPI | | | |
| HDPJ HDPK | | | |
| HDPM HDPN HDPO HDPP | Primary Dendritic cells, frac 2 | pCMVSport3.0 | LP08 |
| HMUA HMUB HMUC | Myoloid Progenitor Cell Line | pCMVSport3.0 | LP08 |
| HHEA HHEB HHEC HHED | T Cell helper I | pCMVSport3.0 | LP08 |
| HHEM HHEN HHEO HHEP | T cell helper II | pCMVSport3.0 | LP08 |
| HEQA HEQB HEQC | Human endometrial stromal cells | pCMVSport3.0 | LP08 |
| HJMA HJMB | Human endometrial stromal | pCMVSport3.0 | LP08 |
| | cells-treated with progesterone | | |
| HSWA HSWB HSWC | Human endometrial stromal | pCMVSport3.0 | LP08 |
| | cells-treated with estradiol | | |
| HSYA HSYB HSYC | Human Thymus Stromal Cells | pCMVSport3.0 | LP08 |
| HLWA HLWB HLWC | Human Placenta | pCMVSport3.0 | LP08 |
| HRAA HRAB HRAC | Rejected Kidney, lib 4 | pCMVSport3.0 | LP08 |
| HMTM | PCR, pBMC I/C treated | PCRII | LP09 |
| HMJA | H. Meniingima, M6 | pSport 1 | LP10 |
| HMKA HMKB HMKC HMKD | H. Meningima, M1 | pSport 1 | LP10 |
| HMKE | | | |
| HUSG HUSI | Human umbilical vein | pSport 1 | LP10 |
| | endothelial cells, IL-4 induced | | |
| HUSX HUSY | Human Umbilical Vein | pSport 1 | LP10 |
| | Endothelial Cells, uninduced | | |
| HOFA | Ovarian Tumor I, OV5232 | pSport 1 | LP10 |
| HCFA HCFB HCFC HCFD | T-Cell PHA 16 hrs | pSport 1 | LP10 |
| HCFL HCFM HCFN HCFO | T-Cell PHA 24 hrs | pSport 1 | LP10 |
| HADA HADC HADD HADE | Human Adipose | pSport 1 | LP10 |
| HADF HADG | | | |
| HOVA HOVB HOVC | Human Ovary | pSport 1 | LP10 |
| HTWB HTWC HTWD HTWE | Resting T-Cell Library, II | pSport 1 | LP10 |
| HTWF | | | |
| HMMA | Spleen metastic melanoma | pSport 1 | LP10 |
| HLYA HLYB HLYC HLYD | Spleen, Chronic lymphocytic | pSport 1 | LP10 |
| HLYE | leukemia | | |
| HCGA | CD34+ cell, I | pSport 1 | LP10 |
| HEOM HEON | Human Eosinophils | pSport 1 | LP10 |
| HTDA | Human Tonsil, Lib 3 | pSport 1 | LP10 |
| HSPA | Salivary Gland, Lib 2 | pSport 1 | LP10 |
| HCHA HCHB HCHC | Breast Cancer cell line, MDA 36 | pSport 1 | LP10 |
| HCHM HCHN | Breast Cancer Cell line, | pSport 1 | LP10 |
| | angiogenic | | |
| HCIA | Crohn's Disease | pSport 1 | LP10 |
| HDAA HDAB HDAC | HEL cell line | pSport 1 | LP10 |
| HABA | Human Astrocyte | pSport 1 | LP10 |
| HUFA HUFB HUFC | Ulcerative Colitis | pSport 1 | LP10 |
| HNTM | NTERA2 + retinoic acid, 14 | pSport 1 | LP10 |
| | days | | |
| HDQA | Primary Dendritic | pSport 1 | LP10 |
| | cells, CapFinder2, frac 1 | | |
| HDQM | Primary Dendritic Cells, | pSport 1 | LP10 |
| | CapFinder, frac 2 | | |
| HLDX | Human Liver, normal, CapFinder | pSport 1 | LP10 |
| HULA HULB HULC | Human Dermal Endothelial | pSport1 | LP10 |
| | Cells, untreated | | |
| HUMA | Human Dermal Endothelial | pSport1 | LP10 |
| | cells, treated | | |
| HCJA | Human Stromal Endometrial | pSport1 | LP10 |
| | fibroblasts, untreated | | |
| HCJM | Human Stromal endometrial | pSport1 | LP10 |
| | fibroblasts, treated w/estradiol | | |
| HEDA | Human Stromal endometrial | pSport1 | LP10 |
| | fibroblasts, treated with | | |
| | progesterone | | |
| HFNA | Human ovary tumor cell | pSport1 | LP10 |
| | OV350721 | | |
| HKGA HKGB HKGC HKGD | Merkel Cells | pSport1 | LP10 |
| HISA HISB HISC | Pancreas Islet Cell Tumor | pSport1 | LP10 |
| HLSA | Skin, burned | pSport1 | LP10 |
| HBZA | Prostate, BPH, Lib 2 | pSport 1 | LP10 |
| HBZS | Prostate BPH, Lib 2, subtracted | pSport 1 | LP10 |
| HFIA HFIB HFIC | Synovial Fibroblasts (control) | pSport 1 | LP10 |
| HFIH HFII HFIJ | Synovial hypoxia | pSport 1 | LP10 |
| HFIT HFIU HFIV | Synovial IL-1/TNF stimulated | pSport 1 | LP10 |
| HGCA | Messangial cell, frac 1 | pSport1 | LP10 |
| HMVA HMVB HMVC | Bone Marrow Stromal Cell, | pSport1 | LP10 |
| | untreated | | |
| HFIX HFIY HFIZ | Synovial Fibroblasts (Il1/TNF), | pSport1 | LP10 |
| | subt | | |
| HFOX HFOY HFOZ | Synovial hypoxia-RSF | pSport1 | LP10 |
| | subtracted | | |
| HMQA HMQB HMQC HMQD | Human Activated Monocytes | Uni-ZAP XR | LP11 |
| HLIA HLIB HLIC | Human Liver | pCMVSport 1 | LP012 |
| HHBA HHBB HHBC HHBD | Human Heart | pCMVSport 1 | LP012 |
| HHBE | | | |
| HBBA HBBB | Human Brain | pCMVSport 1 | LP012 |
| HLJA HLJB HLJC HLJD HLJE | Human Lung | pCMVSport 1 | LP012 |
| HOGA HOGB HOGC | Ovarian Tumor | pCMVSport 2.0 | LP012 |
| HTJM | Human Tonsils, Lib 2 | pCMVSport 2.0 | LP012 |
| HAMF HAMG | KMH2 | pCMVSport 3.0 | LP012 |
| HAJA HAJB HAJC | L428 | pCMVSport 3.0 | LP012 |
| HWBA HWBB HWBC HWBD | Dendritic cells, pooled | pCMVSport 3.0 | LP012 |
| HWBE | | | |
| HWAA HWAB HWAC HWAD | Human Bone Marrow, treated | pCMVSport 3.0 | LP012 |
| HWAE | | | |
| HYAA HYAB HYAC | B Cell lymphoma | pCMVSport 3.0 | LP012 |
| HWHG HWHH HWHI | Healing groin wound, 6.5 hours | pCMVSport 3.0 | LP012 |
| | post incision | | |
| HWHP HWHQ HWHR | Healing groin wound; 7.5 hours | pCMVSport 3.0 | LP012 |
| | Post incision | | |
| HARM | Healing groin wound - zero hr | pCMVSport 3.0 | LP012 |
| | post-incision (control) | | |
| HBIM | Olfactory epithelium; | pCMVSport 3.0 | LP012 |
| | nasalcavity | | |
| HWDA | Healing Abdomen wound; | pCMVSport 3.0 | LP012 |
| | 70&90 min post incision | | |
| HWEA | Healing Abdomen Wound; 15 | pCMVSport 3.0 | LP012 |
| | days post incision | | |
| HWJA | Healing Abdomen | pCMVSport 3.0 | LP012 |
| | Wound; 21&29 days | | |
| HNAL | Human Tongue, frac 2 | PSport1 | LP012 |
| HMJA | H. Meniingima, M6 | pSport1 | LP012 |
| HMKA HMKB HMKC HMKD | H. Meningima, M1 | pSport1 | LP012 |
| HMKE | | | |
| HOFA | Ovarian Tumor I, OV5232 | pSport1 | LP012 |
| HCFA HCFB HCFC HCFD | T-Cell PHA 16 hrs | pSport1 | LP012 |
| HCFL HCFM HCFN HCFO | T-Cell PHA 24 hrs | pSport1 | LP012 |
| HMMA HMMB HMMC | Spleen metastic melanoma | pSport1 | LP012 |
| HTDA | Human Tonsil, Lib 3 | pSport1 | LP012 |
| HDBA | Human Fetal Thymus | pSport1 | LP012 |
| HDUA | Pericardium | pSport1 | LP012 |
| HBZA | Prostate, BPH, Lib 2 | pSport1 | LP012 |
| HWCA | Larynx tumor | pSport1 | LP012 |
| HWKA | Normal lung | pSport1 | LP012 |
| HSMB | Bone marrow stroma, treated | pSport1 | LP012 |
| HBHM | Normal trachea | pSport1 | LP012 |
| HLFC | Human Larynx | pSport1 | LP012 |
| HLRB | Siebben Polyposis | pSport1 | LP012 |
| HNIA | Mammary Gland | pSport1 | LP012 |
| HNJB | Palate carcinoma | pSport1 | LP012 |
| HNKA | Palate normal | pSport1 | LP012 |
| HMZA | Pharynx carcinoma | pSport1 | LP012 |
| HABG | Cheek Carcinoma | pSport1 | LP012 |
| HMZM | Pharynx Carcinoma | pSport1 | LP012 |
| HDRM | Larynx Carcinoma | pSport1 | LP012 |
| HVAA | Pancreas normal PCA4 No | pSport1 | LP012 |
| HICA | Tongue carcinoma | pSport1 | LP012 |
| HUKA HUKB HUKC HUKD | Human Uterine Cancer | Lambda ZAP II | LP013 |
| HUKE | | | |
| HFFA | Human Fetal Brain, random | Lambda ZAP II | LP013 |
| | primed | | |
| HTUA | Activated T-cell labeled with 4- | Lambda ZAP II | LP013 |
| | thioluri | | |
| HBQA | Early Stage Human Brain, | Lambda ZAP II | LP013 |
| | random primed | | |
| HMEB | Human microvascular | Lambda ZAP II | LP013 |
| | Endothelial cells, fract. B | | |
| HUSH | Human Umbilical Vein | Lambda ZAP II | LP013 |
| | Endothelial cells, fract. A, re- | | |
| | excision | | |
| HLQC HLQD | Hepatocellular tumor, re- | Lambda ZAP II | LP013 |
| | excision | | |
| HTWJ HTWK HTWL | Resting T-cell, re-excision | Lambda ZAP II | LP013 |
| HF6S | Human Whole 6 week Old | pBluescript | LP013 |
| | Embryo (II), subt | | |
| HHPS | Human Hippocampus, | pBluescript | LP013 |
| | subtracted | | |
| HL1S | LNCAP, differential expression | pBluescript | LP013 |
| HLHS HLHT | Early Stage Human Lung, | pBluescript | LP013 |
| | Subtracted | | |
| HSUS | Supt cells, cyclohexamide | pBluescript | LP013 |
| | treated, subtracted | | |
| HSUT | Supt cells, cyclohexamide | pBluescript | LP013 |
| | treated, differentially expressed | | |
| HSDS | H. Striatum Depression, | pBluescript | LP013 |
| | subtracted | | |
| HPTZ | Human Pituitary, Subtracted VII | pBluescript | LP013 |
| HSDX | H. Striatum Depression, subt II | pBluescript | LP013 |
| HSDZ | H. Striatum Depression, subt | pBluescript | LP013 |
| HPBA HPBB HPBC HPBD | Human Pineal Gland | pBluescript SK− | LP013 |
| HPBE | | | |
| HRTA | Colorectal Tumor | pBluescript SK− | LP013 |
| HSBA HSBB HSBC HSBM | HSC172 cells | pBluescript SK− | LP013 |
| HJAA HJAB HJAC HJAD | Jurkat T-cell G1 phase | pBluescript SK− | LP013 |
| HJBA HJBB HJBC HJBD | Jurkat T-cell, S1 phase | pBluescript SK− | LP013 |
| HTNA HTNB | Human Thyroid | pBluescript SK− | LP013 |
| HAHA HAHB | Human Adult Heart | Uni-ZAP XR | LP013 |
| HE6A | Whole 6 week Old Embryo | Uni-ZAP XR | LP013 |
| HFCA HFCB HFCC HFCD | Human Fetal Brain | Uni-ZAP XR | LP013 |
| HFCE | | | |
| HFKC HFKD HFKE HFKF | Human Fetal Kidney | Uni-ZAP XR | LP013 |
| HFKG | | | |
| HGBA HGBD HGBE HGBF | Human Gall Bladder | Uni-ZAP XR | LP013 |
| HGBG | | | |
| HPRA HPRB HPRC HPRD | Human Prostate | Uni-ZAP XR | LP013 |
| HTEA HTEB HTEC HTED | Human Testes | Uni-ZAP XR | LP013 |
| HTEE | | | |
| HTTA HTTB HTTC HTTD | Human Testes Tumor | Uni-ZAP XR | LP013 |
| HTTE | | | |
| HYBA HYBB | Human Fetal Bone | Uni-ZAP XR | LP013 |
| HFLA | Human Fetal Liver | Uni-ZAP XR | LP013 |
| HHFB HHFC HHFD HHFE | Human Fetal Heart | Uni-ZAP XR | LP013 |
| HHFF | | | |
| HUVB HUVC HUVD HUVE | Human Umbilical Vein, End. | Uni-ZAP XR | LP013 |
| | remake | | |
| HTHB HTHC HTHD | Human Thymus | Uni-ZAP XR | LP013 |
| HSTA HSTB HSTC HSTD | Human Skin Tumor | Uni-ZAP XR | LP013 |
| HTAA HTAB HTAC HTAD | Human Activated T-cells | Uni-ZAP XR | LP013 |
| HTAE | | | |
| HFEA HFEB HFEC | Human Fetal Epithelium (skin) | Uni-ZAP XR | LP013 |
| HJPA HJPB HJPC HJPD | Human Jurkat Membrane Bound | Uni-ZAP XR | LP013 |
| | Polysomes | | |
| HESA | Human Epithelioid Sarcoma | Uni-ZAP XR | LP013 |
| HALS | Human Adult Liver, Subtracted | Uni-ZAP XR | LP013 |
| HFTA HFTB HFTC HFTD | Human Fetal Dura Mater | Uni-ZAP XR | LP013 |
| HCAA HCAB HCAC | Cem cells, cyclohexamide | Uni-ZAP XR | LP013 |
| | treated | | |
| HRGA HRGB HRGC HRGD | Raji Cells, cyclohexamide | Uni-ZAP XR | LP013 |
| | treated | | |
| HE9A HE9B HE9C HE9D | Nine Week Old Early Stage | Uni-ZAP XR | LP013 |
| HE9E | Human | | |
| HSFA | Human Fibrosarcoma | Uni-ZAP XR | LP013 |
| HATA HATB HATC HATD | Human Adrenal Gland Tumor | Uni-ZAP XR | LP013 |
| HATE | | | |
| HTRA | Human Trachea Tumor | Uni-ZAP XR | LP013 |
| HE2A HE2D HE2E HE2H HE2I | 12 Week Old Early Stage | Uni-ZAP XR | LP013 |
| | Human | | |
| HE2B HE2C HE2F HE2G HE2P | 12 Week Old Early Stage | Uni-ZAP XR | LP013 |
| | Human, II | | |
| HNEA HNEB HNEC HNED | Human Neutrophil | Uni-ZAP XR | LP013 |
| HNEE | | | |
| HBGA | Human Primary Breast Cancer | Uni-ZAP XR | LP013 |
| HPTS HPTT HPTU | Human Pituitary, subtracted | Uni-ZAP XR | LP013 |
| HMQA HMQB HMQC HMQD | Human Activated Monocytes | Uni-ZAP XR | LP013 |
| HOAA HOAB HOAC | Human Osteosarcoma | Uni-ZAP XR | LP013 |
| HTOA HTOD HTOE HTOF | human tonsils | Uni-ZAP XR | LP013 |
| HTOG | | | |
| HMGB | Human OB MG63 control | Uni-ZAP XR | LP013 |
| | fraction I | | |
| HOPB | Human OB HOS control fraction I | Uni-ZAP XR | LP013 |
| HOQB | Human OB HOS treated (1 nM | Uni-ZAP XR | LP013 |
| | E2) fraction I | | |
| HAUA HAUB HAUC | Amniotic Cells - TNF induced | Uni-ZAP XR | LP013 |
| HAQA HAQB HAQC HAQD | Amniotic Cells - Primary | Uni-ZAP XR | LP013 |
| | Culture | | |
| HROA HROC | HUMAN STOMACH | Uni-ZAP XR | LP013 |
| HBJA HBJB HBJC HBJD HBJE | HUMAN B CELL | Uni-ZAP XR | LP013 |
| | LYMPHOMA | | |
| HODA HODB HODC HODD | human ovarian cancer | Uni-ZAP XR | LP013 |
| HCPA | Corpus Callosum | Uni-ZAP XR | LP013 |
| HSOA | stomach cancer (human) | Uni-ZAP XR | LP013 |
| HERA | SKIN | Uni-ZAP XR | LP013 |
| HMDA | Brain-medulloblastoma | Uni-ZAP XR | LP013 |
| HGLA HGLB HGLD | Glioblastoma | Uni-ZAP XR | LP013 |
| HWTA HWTB HWTC | wilm's tumor | Uni-ZAP XR | LP013 |
| HEAA | H. Atrophic Endometrium | Uni-ZAP XR | LP013 |
| HAPN HAPO HAPP HAPQ | Human Adult Pulmonary; re- | Uni-ZAP XR | LP013 |
| HAPR | excision | | |
| HLTG HLTH | Human T-cell lymphoma; re- | Uni-ZAP XR | LP013 |
| | excision | | |
| HAHC HAHD HAHE | Human Adult Heart; re-excision | Uni-ZAP XR | LP013 |
| HAGA HAGB HAGC HAGD | Human Amygdala | Uni-ZAP XR | LP013 |
| HAGE | | | |
| HSJA HSJB HSJC | Smooth muscle-ILb induced | Uni-ZAP XR | LP013 |
| HSHA HSHB HSHC | Smooth muscle, IL1b induced | Uni-ZAP XR | LP013 |
| HPWA HPWB HPWC HPWD | Prostate BPH | Uni-ZAP XR | LP013 |
| HPWE | | | |
| HPIA HPIB HPIC | LNCAP prostate cell line | Uni-ZAP XR | LP013 |
| HPJA HPJB HPJC | PC3 Prostate cell line | Uni-ZAP XR | LP013 |
| HBTA | Bone Marrow Stroma, | Uni-ZAP XR | LP013 |
| | TNF&LPS ind | | |
| HMCF HMCG HMCH HMCI | Macrophage-oxLDL; re-excision | Uni-ZAP XR | LP013 |
| HMCJ | | | |
| HAGG HAGH HAGI | Human Amygdala; re-excision | Uni-ZAP XR | LP013 |
| HACA | H. Adipose Tissue | Uni-ZAP XR | LP013 |
| HKFB | K562 + PMA (36 hrs), re- | ZAP Express | LP013 |
| | excision | | |
| HCWT HCWU HCWV | CD34 positive cells (cord | ZAP Express | LP013 |
| | blood), re-ex | | |
| HBWA | Whole brain | ZAP Express | LP013 |
| HBXA HBXB HBXC HBXD | Human Whole Brain #2 - Oligo | ZAP Express | LP013 |
| | dT >1.5 Kb | | |
| HAVM | Temporal cortex-Alzheizmer | pT-Adv | LP014 |
| HAVT | Hippocampus, Alzheimer | pT-Adv | LP014 |
| | Subtracted | | |
| HHAS | CHME Cell Line | Uni-ZAP XR | LP014 |
| HAJR | Larynx normal | pSport 1 | LP014 |
| HWLE HWLF HWLG HWLH | Colon Normal | pSport 1 | LP014 |
| HCRM HCRN HCRO | Colon Carcinoma | pSport 1 | LP014 |
| HWLI HWLJ HWLK | Colon Normal | pSport 1 | LP014 |
| HWLQ HWLR HWLS HWLT | Colon Tumor | pSport 1 | LP014 |
| HBFM | Gastrocnemius Muscle | pSport 1 | LP014 |
| HBOD HBOE | Quadriceps Muscle | pSport 1 | LP014 |
| HBKD HBKE | Soleus Muscle | pSport 1 | LP014 |
| HCCM | Pancreatic Langerhans | pSport 1 | LP014 |
| HWGA | Larynx carcinoma | pSport 1 | LP014 |
| HWGM HWGN | Larynx carcinoma | pSport 1 | LP014 |
| HWLA HWLB HWLC | Normal colon | pSport 1 | LP014 |
| HWLM HWLN | Colon Tumor | pSport 1 | LP014 |
| HVAM HVAN HVAO | Pancreas Tumor | pSport 1 | LP014 |
| HWGQ | Larynx carcinoma | pSport 1 | LP014 |
| HAQM HAQN | Salivary Gland | pSport 1 | LP014 |
| HASM | Stomach; normal | pSport 1 | LP014 |
| HBCM | Uterus; normal | pSport 1 | LP014 |
| HCDM | Testis; normal | pSport 1 | LP014 |
| HDJM | Brain; normal | pSport 1 | LP014 |
| HEFM | Adrenal Gland, normal | pSport 1 | LP014 |
| HBAA | Rectum normal | pSport 1 | LP014 |
| HFDM | Rectum tumour | pSport 1 | LP014 |
| HGAM | Colon, normal | pSport 1 | LP014 |
| HHMM | Colon, tumour | pSport 1 | LP014 |
| HCLB HCLC | Human Lung Cancer | Lambda Zap II | LP015 |
| HRLA | L1 Cell line | ZAP Express | LP015 |
| HHAM | Hypothalamus, Alzheimer's | pCMVSport 3.0 | LP015 |
| HKBA | Ku 812F Basophils Line | pSport 1 | LP015 |
| HS2S | Saos2, Dexamethosome Treated | pSport 1 | LP016 |
| HA5A | Lung Carcinoma A549 | pSport 1 | LP016 |
| | TNFalpha activated | | |
| HTFM | TF-1 Cell Line GM-CSF Treated | pSport 1 | LP016 |
| HYAS | Thyroid Tumour | pSport 1 | LP016 |
| HUTS | Larynx Normal | pSport 1 | LP016 |
| HXOA | Larynx Tumor | pSport 1 | LP016 |
| HEAH | Ea.hy.926 cell line | pSport 1 | LP016 |
| HINA | Adenocarcinoma Human | pSport 1 | LP016 |
| HRMA | Lung Mesothelium | pSport 1 | LP016 |
| HLCL | Human Pre-Differentiated | Uni-Zap XR | LP017 |
| | Adipocytes | | |
| HS2A | Saos2 Cells | pSport 1 | LP020 |
| HS2I | Saos2 Cells; Vitamin D3 Treated | pSport 1 | LP020 |
| HUCM | CHME Cell Line, untreated | pSport 1 | LP020 |
| HEPN | Aryepiglottis Normal | pSport 1 | LP020 |
| HPSN | Sinus Piniformis Tumour | pSport 1 | LP020 |
| HNSA | Stomach Normal | pSport 1 | LP020 |
| HNSM | Stomach Tumour | pSport 1 | LP020 |
| HNLA | Liver Normal Met5No | pSport 1 | LP020 |
| HUTA | Liver Tumour Met 5 Tu | pSport 1 | LP020 |
| HOCN | Colon Normal | pSport 1 | LP020 |
| HOCT | Colon Tumor | pSport 1 | LP020 |
| HTNT | Tongue Tumour | pSport 1 | LP020 |
| HLXN | Larynx Normal | pSport 1 | LP020 |
| HLXT | Larynx Tumour | pSport 1 | LP020 |
| HTYN | Thymus | pSport 1 | LP020 |
| HPLN | Placenta | pSport 1 | LP020 |
| HTNG | Tongue Normal | pSport 1 | LP020 |
| HZAA | Thyroid Normal (SDCA2 No) | pSport 1 | LP020 |
| HWES | Thyroid Thyroiditis | pSport 1 | LP020 |
| HFHD | Ficolled Human Stromal Cells, | pTrip1Ex2 | LP021 |
| | 5Fu treated | | |
| HFHM, HFHN | Ficolled Human Stromal Cells, | pTrip1Ex2 | LP021 |
| | Untreated | | |
| HPCI | Hep G2 Cells, lambda library | lambda Zap-CMV | LP021 |
| | | XR | |
| HBCA, HBCB, HBCC | H. Lymph node breast Cancer | Uni-ZAP XR | LP021 |
| HCOK | Chondrocytes | pSPORT1 | LP022 |
| HDCA, HDCB, HDCC | Dendritic Cells From CD34 | pSPORT1 | LP022 |
| | Cells | | |
| HDMA, HDMB | CD40 activated monocyte | pSPORT1 | LP022 |
| | dendritic cells | | |
| HDDM, HDDN, HDDO | LPS activated derived dendritic | pSPORT1 | LP022 |
| | cells | | |
| HPCR | Hep G2 Cells, PCR library | lambda Zap-CMV | LP022 |
| | | XR | |
| HAAA, HAAB, HAAC | Lung, Cancer (4005313A3): | pSPORT1 | LP022 |
| | Invasive Poorly Differentiated | | |
| | Lung Adenocarcinoma | | |
| HIPA, HIPB, HIPC | Lung, Cancer (4005163 B7): | pSPORT1 | LP022 |
| | Invasive, Poorly Diff. | | |
| | Adenocarcinoma, Metastatic | | |
| HOOH, HOOI | Ovary, Cancer: (4004562 B6) | pSPORT1 | LP022 |
| | Papillary Serous Cystic | | |
| | Neoplasm, Low Malignant Pot | | |
| HIDA | Lung, Normal: (4005313 B1) | pSPORT1 | LP022 |
| HUJA, HUJB, HUJC, HUJD, HUJE | B-Cells | pCMVSport 3.0 | LP022 |
| HNOA, HNOB, HNOC, HNOD | Ovary, Normal: (9805C040R) | pSPORT1 | LP022 |
| HNLM | Lung, Normal: (4005313 B1) | pSPORT1 | LP022 |
| HSCL | Stromal Cells | pSPORT1 | LP022 |
| HAAX | Lung, Cancer: (4005313 A3) | pSPORT1 | LP022 |
| | Invasive Poorly-differentiated | | |
| | Metastatic lung adenocarcinoma | | |
| HUUA, HUUB, HUUC, HUUD | B-cells (unstimulated) | pTrip1Ex2 | LP022 |
| HWWA, HWWB, HWWC, HWWD, | B-cells (stimulated) | pSPORT1 | LP022 |
| HWWE, HWWF, HWWG | | | |
| HCCC | Colon, Cancer: (9808C064R) | pCMVSport 3.0 | LP023 |
| HPDO HPDP HPDQ HPDR | Ovary, Cancer (9809C332): | pSport 1 | LP023 |
| HPD | Poorly differentiated | | |
| | adenocarcinoma | | |
| HPCO HPCP HPCQ HPCT | Ovary, Cancer (15395A1F): | pSport 1 | LP023 |
| | Grade II Papillary Carcinoma | | |
| HOCM HOCO HOCP HOCQ | Ovary, Cancer: (15799A1F) | pSport 1 | LP023 |
| | Poorly differentiated carcinoma | | |
| HCBM HCBN HCBO | Breast, Cancer: (4004943 A5) | pSport 1 | LP023 |
| HNBT HNBU HNBV | Breast, Normal: (4005522B2) | pSport 1 | LP023 |
| HBCP HBCQ | Breast, Cancer: (4005522 A2) | pSport 1 | LP023 |
| HBCJ | Breast, Cancer: (9806C012R) | pSport 1 | LP023 |
| HSAM HSAN | Stromal cells 3.88 | pSport 1 | LP023 |
| HVCA HVCB HVCC HVCD | Ovary, Cancer: (4004332 A2) | pSport 1 | LP023 |
| HSCK HSEN HSEO | Stromal cells (HBM3.18) | pSport 1 | LP023 |
| HSCP HSCQ | stromal cell clone 2.5 | pSport 1 | LP023 |
| HUXA | Breast Cancer: (4005385 A2) | pSport 1 | LP023 |
| HCOM HCON HCOO HCOP | Ovary, Cancer (4004650 A3): | pSport 1 | LP023 |
| HCOQ | Well-Differentiated | | |
| | Micropapillary Serous | | |
| | Carcinoma | | |
| HBNM | Breast, Cancer: (9802C020E) | pSport 1 | LP023 |
| HVVA HVVB HVVC HVVD | Human Bone Marrow, treated | pSport 1 | LP023 |
| HVVE | | | |

[0748] Two nonlimiting examples are provided below for isolating a particular clone from the deposited sample of plasmid cDNAs cited for that clone in Table 7. First, a plasmid is directly isolated by screening the clones using a polynucleotide probe corresponding to the nucleotide sequence of SEQ ID NO:X.

[0749] Particularly, a specific polynucleotide with 30-40 nucleotides is synthesized using an Applied Biosystems DNA synthesizer according to the sequence reported. The oligonucleotide is labeled, for instance, with ³²P-γ-ATP using T4 polynucleotide kinase and purified according to routine methods. (E.g., Maniatis et al., Molecular Cloning: A Laboratory Manual, Cold Spring Harbor Press, Cold Spring, N.Y. (1982)). The plasmid mixture is transformed into a suitable host, as indicated above (such as XL-1 Blue (Stratagene)) using techniques known to those of skill in the art, such as those provided by the vector supplier or in related publications or patents cited above. The transformants are plated on 1.5% agar plates (containing the appropriate selection agent, e.g., ampicillin) to a density of about 150 transformants (colonies) per plate. These plates are screened using Nylon membranes according to routine methods for bacterial colony screening (e.g., Sambrook et al., Molecular Cloning: A Laboratory Manual, 2nd Edit., (1989), Cold Spring Harbor Laboratory Press, pages 1.93 to 1.104), or other techniques known to those of skill in the art.

[0750] Alternatively, two primers of 17-20 nucleotides derived from both ends of the nucleotide sequence of SEQ ID NO:X are synthesized and used to amplify the desired cDNA using the deposited cDNA plasmid as a template. The polymerase chain reaction is carried out under routine conditions, for instance, in 25 μl of reaction mixture with 0.5 ug of the above cDNA template. A convenient reaction mixture is 1.5-5 mM MgCl₂, 0.01% (w/v) gelatin, 20 μM each of dATP, dCTP, dGTP, dTTP, 25 pmol of each primer and 0.25 Unit of Taq polymerase. Thirty five cycles of PCR (denaturation at 94° C. for 1 min; annealing at 55° C. for 1 min; elongation at 72° C. for 1 min) are performed with a Perkin-Elmer Cetus automated thermal cycler. The amplified product is analyzed by agarose gel electrophoresis and the DNA band with expected molecular weight is excised and purified. The PCR product is verified to be the selected sequence by subcloning and sequencing the DNA product.

[0751] Several methods are available for the identification of the 5′ or 3′ non-coding portions of a gene which may not be present in the deposited clone. These methods include but are not limited to, filter probing, clone enrichment using specific probes, and protocols similar or identical to 5′ and 3′ “RACE” protocols which are well known in the art. For instance, a method similar to 5′ RACE is available for generating the missing 5′ end of a desired full-length transcript. (Fromont-Racine et al., Nucleic Acids Res. 21(7):1683-1684 (1993)).

[0752] Briefly, a specific RNA oligonucleotide is ligated to the 5′ ends of a population of RNA presumably containing full-length gene RNA transcripts. A primer set containing a primer specific to the ligated RNA oligonucleotide and a primer specific to a known sequence of the gene of interest is used to PCR amplify the 5′ portion of the desired full-length gene. This amplified product may then be sequenced and used to generate the full length gene.

[0753] This above method starts with total RNA isolated from the desired source, although poly-A+ RNA can be used. The RNA preparation can then be treated with phosphatase if necessary to eliminate 5′ phosphate groups on degraded or damaged RNA which may interfere with the later RNA ligase step. The phosphatase should then be inactivated and the RNA treated with tobacco acid pyrophosphatase in order to remove the cap structure present at the 5′ ends of messenger RNAs. This reaction leaves a 5′ phosphate group at the 5′ end of the cap cleaved RNA which can then be ligated to an RNA oligonucleotide using T4 RNA ligase.

[0754] This modified RNA preparation is used as a template for first strand cDNA synthesis using a gene specific oligonucleotide. The first strand synthesis reaction is used as a template for PCR amplification of the desired 5′ end using a primer specific to the ligated RNA oligonucleotide and a primer specific to the known sequence of the gene of interest. The resultant product is then sequenced and analyzed to confirm that the 5′ end sequence belongs to the desired gene.

### Example 2

### Isolation of Genomic Clones Corresponding to a Polynucleotide

[0755] A human genomic P1 library (Genomic Systems, Inc.) is screened by PCR using primers selected for the sequence corresponding to SEQ ID NO:X according to the method described in Example 1. (See also, Sambrook.)

### Example 3

### Tissue Specific Expression Analysis

[0756] The Human Genome Sciences, Inc. (HGS) database is derived from sequencing tissue and/or disease specific cDNA libraries. Libraries generated from a particular tissue are selected and the specific tissue expression pattern of EST groups or assembled contigs within these libraries is determined by comparison of the expression patterns of those groups or contigs within the entire database. ESTs and assembled contigs which show tissue specific expression are selected.

[0757] The original clone from which the specific EST sequence was generated, or in the case of an assembled contig, the clone from which the 5′ most EST sequence was generated, is obtained from the catalogued library of clones and the insert amplified by PCR using methods known in the art. The PCR product is denatured and then transferred in 96 or 384 well format to a nylon membrane (Schleicher and Scheull) generating an array filter of tissue specific clones. Housekeeping genes, maize genes, and known tissue specific genes are included on the filters. These targets can be used in signal normalization and to validate assay sensitivity. Additional targets are included to monitor probe length and specificity of hybridization.

[0758] Radioactively labeled hybridization probes are generated by first strand cDNA synthesis per the manufacturer's instructions (Life Technologies) from mRNA/RNA samples prepared from the specific tissue being analyzed (e.g., prostate, prostate cancer, ovarian, ovarian cancer, etc.). The hybridization probes are purified by gel exclusion chromatography, quantitated, and hybridized with the array filters in hybridization bottles at 65° C. overnight. The filters are washed under stringent conditions and signals are captured using a Fuji phosphorimager.

[0759] Data is extracted using AIS software and following background subtraction, signal normalization is performed. This includes a normalization of filter-wide expression levels between different experimental runs. Genes that are differentially expressed in the tissue of interest are identified.

### Example 4

### Chromosomal Mapping of the Polynucleotides

[0760] An oligonucleotide primer set is designed according to the sequence at the 5′ end of SEQ ID NO:X. This primer preferably spans about 100 nucleotides. This primer set is then used in a polymerase chain reaction under the following set of conditions: 30 seconds, 95° C.; 1 minute, 56° C.; 1 minute, 70° C. This cycle is repeated 32 times followed by one 5 minute cycle at 70° C. Human, mouse, and hamster DNA is used as template in addition to a somatic cell hybrid panel containing individual chromosomes or chromosome fragments (Bios, Inc). The reactions are analyzed on either 8% polyacrylamide gels or 3.5% agarose gels. Chromosome mapping is determined by the presence of an approximately 100 bp PCR fragment in the particular somatic cell hybrid.

### Example 5

### Bacterial Expression of a Polypeptide

[0761] A polynucleotide encoding a polypeptide of the present invention is amplified using PCR oligonucleotide primers corresponding to the 5′ and 3′ ends of the DNA sequence, as outlined in Example 1, to synthesize insertion fragments. The primers used to amplify the cDNA insert should preferably contain restriction sites, such as BamHI and XbaI, at the 5′ end of the primers in order to clone the amplified product into the expression vector. For example, BamHI and XbaI correspond to the restriction enzyme sites on the bacterial expression vector pQE-9. (Qiagen, Inc., Chatsworth, Calif.). This plasmid vector encodes antibiotic resistance (Amp^{r}), a bacterial origin of replication (ori), an IPTG-regulatable promoter/operator (P/O), a ribosome binding site (RBS), a 6-histidine tag (6-His), and restriction enzyme cloning sites.

[0762] The pQE-9 vector is digested with BamHI and XbaI and the amplified fragment is ligated into the pQE-9 vector maintaining the reading frame initiated at the bacterial RBS. The ligation mixture is then used to transform the E. coli strain M15/rep4 (Qiagen, Inc.) which contains multiple copies of the plasmid pREP4, which expresses the lacI repressor and also confers kanamycin resistance (Kan^{r}). Transformants are identified by their ability to grow on LB plates and ampicillin/kanamycin resistant colonies are selected. Plasmid DNA is isolated and confirmed by restriction analysis.

[0763] Clones containing the desired constructs are grown overnight (O/N) in liquid culture in LB media supplemented with both Amp (100 ug/ml) and Kan (25 ug/ml). The O/N culture is used to inoculate a large culture at a ratio of 1:100 to 1:250. The cells are grown to an optical density 600 (O.D.⁶⁰⁰) of between 0.4 and 0.6. IPTG (Isopropyl-B-D-thiogalacto pyranoside) is then added to a final concentration of 1 mM. IPTG induces by inactivating the lacI repressor, clearing the P/O leading to increased gene expression.

[0764] Cells are grown for an extra 3 to 4 hours. Cells are then harvested by centrifugation (20 mins at 6000×g). The cell pellet is solubilized in the chaotropic agent 6 Molar Guanidine HCl by stirring for 3-4 hours at 4° C. The cell debris is removed by centrifugation, and the supernatant containing the polypeptide is loaded onto a nickel-nitrilo-tri-acetic acid (“Ni-NTA”) affinity resin column (available from QIAGEN, Inc., supra). Proteins with a 6×His tag bind to the Ni-NTA resin with high affinity and can be purified in a simple one-step procedure (for details see: The QIAexpressionist (1995) QIAGEN, Inc., supra).

[0765] Briefly, the supernatant is loaded onto the column in 6 M guanidine-HCl, pH 8. The column is first washed with 10 volumes of 6 M guanidine-HCl, pH 8, then washed with 10 volumes of 6 M guanidine-HCl pH 6, and finally the polypeptide is eluted with 6 M guanidine-HCl, pH 5.

[0766] The purified protein is then renatured by dialyzing it against phosphate-buffered saline (PBS) or 50 mM Na-acetate, pH 6 buffer plus 200 mM NaCl. Alternatively, the protein can be successfully refolded while immobilized on the Ni-NTA column. The recommended conditions are as follows: renature using a linear 6M-1M urea gradient in 500 mM NaCl, 20% glycerol, 20 mM Tris/HCl pH 7.4, containing protease inhibitors. The renaturation should be performed over a period of 1.5 hours or more. After renaturation the proteins are eluted by the addition of 250 mM immidazole. Immidazole is removed by a final dialyzing step against PBS or 50 mM sodium acetate pH 6 buffer plus 200 mM NaCl. The purified protein is stored at 4° C. or frozen at −80° C.

[0767] In addition to the above expression vector, the present invention further includes an expression vector, called pHE4a (ATCC Accession Number 209645, deposited on Feb. 25, 1998) which contains phage operator and promoter elements operatively linked to a polynucleotide of the present invention, called pHE4a. (ATCC Accession Number 209645, deposited on Feb. 25, 1998.) This vector contains: 1) a neomycinphosphotransferase gene as a selection marker, 2) an E. coli origin of replication, 3) a T5 phage promoter sequence, 4) two lac operator sequences, 5) a Shine-Delgarno sequence, and 6) the lactose operon repressor gene (lacIq). The origin of replication (oriC) is derived from pUC19 (LTI, Gaithersburg, Md.). The promoter and operator sequences are made synthetically.

[0768] DNA can be inserted into the pHE4a by restricting the vector with NdeI and XbaI, BamHI, XhoI, or Asp718, running the restricted product on a gel, and isolating the larger fragment (the stuffer fragment should be about 310 base pairs). The DNA insert is generated according to the PCR protocol described in Example 1, using PCR primers having restriction sites for NdeI (5′ primer) and XbaI, BamHI, XhoI, or Asp718 (3′ primer). The PCR insert is gel purified and restricted with compatible enzymes. The insert and vector are ligated according to standard protocols.

[0769] The engineered vector could easily be substituted in the above protocol to express protein in a bacterial system.

### Example 6

### Purification of a Polypeptide from an Inclusion Body

[0770] The following alternative method can be used to purify a polypeptide expressed in E coli when it is present in the form of inclusion bodies. Unless otherwise specified, all of the following steps are conducted at 4-10° C.

[0771] Upon completion of the production phase of the E. coli fermentation, the cell culture is cooled to 4-10° C. and the cells harvested by continuous centrifugation at 15,000 rpm (Heraeus Sepatech). On the basis of the expected yield of protein per unit weight of cell paste and the amount of purified protein required, an appropriate amount of cell paste, by weight, is suspended in a buffer solution containing 100 mM Tris, 50 mM EDTA, pH 7.4. The cells are dispersed to a homogeneous suspension using a high shear mixer.

[0772] The cells are then lysed by passing the solution through a microfluidizer (Microfuidics, Corp. or APV Gaulin, Inc.) twice at 4000-6000 psi. The homogenate is then mixed with NaCl solution to a final concentration of 0.5 M NaCl, followed by centrifugation at 7000×g for 15 min. The resultant pellet is washed again using 0.5M NaCl, 100 mM Tris, 50 mM EDTA, pH 7.4.

[0773] The resulting washed inclusion bodies are solubilized with 1.5 M guanidine hydrochloride (GuHCl) for 2-4 hours. After 7000×g centrifugation for 15 min., the pellet is discarded and the polypeptide containing supernatant is incubated at 4° C. overnight to allow further GuHCl extraction.

[0774] Following high speed centrifugation (30,000×g) to remove insoluble particles, the GuHCl solubilized protein is refolded by quickly mixing the GuHCl extract with 20 volumes of buffer containing 50 mM sodium, pH 4.5, 150 mM NaCl, 2 mM EDTA by vigorous stirring. The refolded diluted protein solution is kept at 4° C. without mixing for 12 hours prior to further purification steps.

[0775] To clarify the refolded polypeptide solution, a previously prepared tangential filtration unit equipped with 0.16 μm membrane filter with appropriate surface area (e.g., Filtron), equilibrated with 40 mM sodium acetate, pH 6.0 is employed. The filtered sample is loaded onto a cation exchange resin (e.g., Poros HS-50, Perseptive Biosystems). The column is washed with 40 mM sodium acetate, pH 6.0 and eluted with 250 mM, 500 mM, 1000 mM, and 1500 mM NaCl in the same buffer, in a stepwise manner. The absorbance at 280 nm of the effluent is continuously monitored. Fractions are collected and further analyzed by SDS-PAGE.

[0776] Fractions containing the polypeptide are then pooled and mixed with 4 volumes of water. The diluted sample is then loaded onto a previously prepared set of tandem columns of strong anion (Poros HQ-50, Perseptive Biosystems) and weak anion (Poros CM-20, Perseptive Biosystems) exchange resins. The columns are equilibrated with 40 mM sodium acetate, pH 6.0. Both columns are washed with 40 mM sodium acetate, pH 6.0, 200 mM NaCl. The CM-20 column is then eluted using a 10 column volume linear gradient ranging from 0.2 M NaCl, 50 mM sodium acetate, pH 6.0 to 1.0 M NaCl, 50 mM sodium acetate, pH 6.5. Fractions are collected under constant A₂₈₀ monitoring of the effluent. Fractions containing the polypeptide (determined, for instance, by 16% SDS-PAGE) are then pooled.

[0777] The resultant polypeptide should exhibit greater than 95% purity after the above refolding and purification steps. No major contaminant bands should be observed from Commassie blue stained 16% SDS-PAGE gel when 5 μg of purified protein is loaded. The purified protein can also be tested for endotoxin/LPS contamination, and typically the LPS content is less than 0.1 ng/ml according to LAL assays.

### Example 7

### Cloning and Expression of a Polypeptide in a Baculovirus Expression System

[0778] In this example, the plasmid shuttle vector pA2 is used to insert a polynucleotide into a baculovirus to express a polypeptide. This expression vector contains the strong polyhedrin promoter of the Autographa californica nuclear polyhedrosis virus (AcMNPV) followed by convenient restriction sites such as BamHI, Xba I and Asp718. The polyadenylation site of the simian virus 40 (“SV40”) is used for efficient polyadenylation. For easy selection of recombinant virus, the plasmid contains the beta-galactosidase gene from E. coli under control of a weak Drosophila promoter in the same orientation, followed by the polyadenylation signal of the polyhedrin gene. The inserted genes are flanked on both sides by viral sequences for cell-mediated homologous recombination with wild-type viral DNA to generate a viable virus that express the cloned polynucleotide.

[0779] Many other baculovirus vectors can be used in place of the vector above, such as pAc373, pVL941, and pAcIM1, as one skilled in the art would readily appreciate, as long as the construct provides appropriately located signals for transcription, translation, secretion and the like, including a signal peptide and an in-frame AUG as required. Such vectors are described, for instance, in Luckow et al., Virology 170:31-39 (1989).

[0780] Specifically, the cDNA sequence contained in the deposited clone, including the AUG initiation codon, is amplified using the PCR protocol described in Example 1. If a naturally occurring signal sequence is used to produce the polypeptide of the present invention, the pA2 vector does not need a second signal peptide. Alternatively, the vector can be modified (pA2 GP) to include a baculovirus leader sequence, using the standard methods described in Summers et al., “A Manual of Methods for Baculovirus Vectors and Insect Cell Culture Procedures,” Texas Agricultural Experimental Station Bulletin No. 1555 (1987).

[0781] The amplified fragment is isolated from a 1% agarose gel using a commercially available kit (“Geneclean,” BIO 101 Inc., La Jolla, Calif.). The fragment then is digested with appropriate restriction enzymes and again purified on a 1% agarose gel.

[0782] The plasmid is digested with the corresponding restriction enzymes and optionally, can be dephosphorylated using calf intestinal phosphatase, using routine procedures known in the art. The DNA is then isolated from a 1% agarose gel using a commercially available kit (“Geneclean” BIO 101 Inc., La Jolla, Calif.).

[0783] The fragment and the dephosphorylated plasmid are ligated together with T4 DNA ligase. E. coli HB101 or other suitable E. coli hosts such as XL-1 Blue (Stratagene Cloning Systems, La Jolla, Calif.) cells are transformed with the ligation mixture and spread on culture plates. Bacteria containing the plasmid are identified by digesting DNA from individual colonies and analyzing the digestion product by gel electrophoresis. The sequence of the cloned fragment is confirmed by DNA sequencing.

[0784] Five μg of a plasmid containing the polynucleotide is co-transfected with 1.0 μg of a commercially available linearized baculovirus DNA (“BaculoGold™ baculovirus DNA, Pharmingen, San Diego, Calif.), using the lipofection method described by Feigner et al., Proc. Natl. Acad. Sci. USA 84:7413-7417 (1987). One μg of BaculoGold™ virus DNA and 5 μg of the plasmid are mixed in a sterile well of a microtiter plate containing 50 μl of serum-free Grace's medium (Life Technologies Inc., Gaithersburg, Md.). Afterwards, 10 μl Lipofectin plus 90 μl Grace's medium are added, mixed and incubated for 15 minutes at room temperature. Then the transfection mixture is added drop-wise to Sf9 insect cells (ATCC CRL 1711) seeded in a 35 mm tissue culture plate with 1 ml Grace's medium without serum. The plate is then incubated for 5 hours at 27° C. The transfection solution is then removed from the plate and 1 ml of Grace's insect medium supplemented with 10% fetal calf serum is added. Cultivation is then continued at 27° C. for four days.

[0785] After four days the supernatant is collected and a plaque assay is performed, as described by Summers and Smith, supra. An agarose gel with “Blue Gal” (Life Technologies Inc., Gaithersburg) is used to allow easy identification and isolation of gal-expressing clones, which produce blue-stained plaques. (A detailed description of a “plaque assay” of this type can also be found in the user's guide for insect cell culture and baculovirology distributed by Life Technologies Inc., Gaithersburg, page 9-10.) After appropriate incubation, blue stained plaques are picked with the tip of a micropipettor (e.g., Eppendorf). The agar containing the recombinant viruses is then resuspended in microcentrifuge tube containing 200 μl of Grace's medium and the suspension containing the recombinant baculovirus is used to infect Sf9 cells seeded in 35 mm dishes. Four days later the supernatants of these culture dishes are harvested and then they are stored at 4° C.

[0786] To verify the expression of the polypeptide, Sf9 cells are grown in Grace's medium supplemented with 10% heat-inactivated FBS. The cells are infected with the recombinant baculovirus containing the polynucleotide at a multiplicity of infection (“MOI”) of about 2. If radiolabeled proteins are desired, 6 hours later the medium is removed and is replaced with SF900 II medium minus methionine and cysteine (available from Life Technologies Inc., Rockville, Md.). After 42 hours, 5 μCi of ³⁵S-methionine and 5 μCi ³⁵S-cysteine (available from Amersham) are added. The cells are further incubated for 16 hours and then are harvested by centrifugation. The proteins in the supernatant as well as the intracellular proteins are analyzed by SDS-PAGE followed by autoradiography (if radiolabeled).

[0787] Microsequencing of the amino acid sequence of the amino terminus of purified protein may be used to determine the amino terminal sequence of the produced protein.

### Example 8

### Expression of a Polypeptide in Mammalian Cells

[0788] The polypeptide of the present invention can be expressed in a mammalian cell. A typical mammalian expression vector contains a promoter element, which mediates the initiation of transcription of mRNA, a protein coding sequence, and signals required for the termination of transcription and polyadenylation of the transcript. Additional elements include enhancers, Kozak sequences and intervening sequences flanked by donor and acceptor sites for RNA splicing. Highly efficient transcription is achieved with the early and late promoters from SV40, the long terminal repeats (LTRs) from Retroviruses, e.g., RSV, HTLVI, HIVI and the early promoter of the cytomegalovirus (CMV). However, cellular elements can also be used (e.g., the human actin promoter).

[0789] Suitable expression vectors for use in practicing the present invention include, for example, vectors such as pSVL and pMSG (Pharmacia, Uppsala, Sweden), pRSVcat (ATCC 37152), pSV2dhfr (ATCC 37146), pBC12MI (ATCC 67109), pCMVSport 2.0, and pCMVSport 3.0. Mammalian host cells that could be used include, human Hela, 293, H9 and Jurkat cells, mouse NIH3T3 and C127 cells, Cos 1, Cos 7 and CV1, quail QC1-3 cells, mouse L cells and Chinese hamster ovary (CHO) cells.

[0790] Alternatively, the polypeptide can be expressed in stable cell lines containing the polynucleotide integrated into a chromosome. The co-transfection with a selectable marker such as DHFR, gpt, neomycin, or hygromycin allows the identification and isolation of the transfected cells.

[0791] The transfected gene can also be amplified to express large amounts of the encoded protein. The DHFR (dihydrofolate reductase) marker is useful in developing cell lines that carry several hundred or even several thousand copies of the gene of interest. (See, e.g., Alt, F. W., et al., J. Biol. Chem. 253:1357-1370 (1978); Hamlin, J. L. and Ma, C., Biochem. et Biophys. Acta, 1097:107-143 (1990); Page, M. J. and Sydenham, M. A., Biotechnology 9:64-68 (1991)). Another useful selection marker is the enzyme glutamine synthase (GS) (Murphy et al., Biochem J. 227:277-279 (1991); Bebbington et al., Bio/Technology 10:169-175 (1992). Using these markers, the mammalian cells are grown in selective medium and the cells with the highest resistance are selected. These cell lines contain the amplified gene(s) integrated into a chromosome. Chinese hamster ovary (CHO) and NSO cells are often used for the production of proteins.

[0792] Derivatives of the plasmid pSV2-dhfr (ATCC Accession No. 37146), the expression vectors pC4 (ATCC Accession No. 209646) and pC6 (ATCC Accession No. 209647) contain the strong promoter (LTR) of the Rous Sarcoma Virus (Cullen et al., Molecular and Cellular Biology, 438-447 (March, 1985)) plus a fragment of the CMV-enhancer (Boshart et al., Cell 41:521-530 (1985)). Multiple cloning sites, e.g., with the restriction enzyme cleavage sites BamHI, XbaI and Asp718, facilitate the cloning of the gene of interest. The vectors also contain the 3′ intron, the polyadenylation and termination signal of the rat preproinsulin gene, and the mouse DHFR gene under control of the SV40 early promoter.

[0793] Specifically, the plasmid pC6, for example, is digested with appropriate restriction enzymes and then dephosphorylated using calf intestinal phosphates by procedures known in the art. The vector is then isolated from a 1% agarose gel.

[0794] A polynucleotide of the present invention is amplified according to the protocol outlined in Example 1. If a naturally occurring signal sequence is used to produce the polypeptide of the present invention, the vector does not need a second signal peptide. Alternatively, if a naturally occurring signal sequence is not used, the vector can be modified to include a heterologous signal sequence. (See, e.g., International Publication No. WO 96/34891.)

[0795] The amplified fragment is isolated from a 1% agarose gel using a commercially available kit (“Geneclean,” BIO 101 Inc., La Jolla, Calif.). The fragment then is digested with appropriate restriction enzymes and again purified on a 1% agarose gel.

[0796] The amplified fragment is then digested with the same restriction enzyme and purified on a 1% agarose gel. The isolated fragment and the dephosphorylated vector are then ligated with T4 DNA ligase. E. coli HB101 or XL-1 Blue cells are then transformed and bacteria are identified that contain the fragment inserted into plasmid pC6 using, for instance, restriction enzyme analysis.

[0797] Chinese hamster ovary cells lacking an active DHFR gene is used for transfection. Five μg of the expression plasmid pC6 or pC4 is cotransfected with 0.5 μg of the plasmid pSVneo using lipofectin (Feigner et al., supra). The plasmid pSV2-neo contains a dominant selectable marker, the neo gene from Tn5 encoding an enzyme that confers resistance to a group of antibiotics including G418. The cells are seeded in alpha minus MEM supplemented with 1 mg/ml G418. After 2 days, the cells are trypsinized and seeded in hybridoma cloning plates (Greiner, Germany) in alpha minus MEM supplemented with 10, 25, or 50 ng/ml of methotrexate plus 1 mg/ml G418. After about 10-14 days single clones are trypsinized and then seeded in 6-well petri dishes or 10 ml flasks using different concentrations of methotrexate (50 nM, 100 nM, 200 nM, 400 nM, 800 nM). Clones growing at the highest concentrations of methotrexate are then transferred to new 6-well plates containing even higher concentrations of methotrexate (1 μM, 2 μM, 5 μM, 10 mM, 20 mM). The same procedure is repeated until clones are obtained which grow at a concentration of 100-200 μM. Expression of the desired gene product is analyzed, for instance, by SDS-PAGE and Western blot or by reversed phase HPLC analysis.

### Example 9

### Protein Fusions

[0798] The polypeptides of the present invention are preferably fused to other proteins. These fusion proteins can be used for a variety of applications. For example, fusion of the present polypeptides to His-tag, HA-tag, protein A, IgG domains, and maltose binding protein facilitates purification. (See Example 5; see also EP A 394,827; Traunecker, et al., Nature 331:84-86 (1988)). Similarly, fusion to IgG-1, IgG-3, and albumin increases the halflife time in vivo. Nuclear localization signals fused to the polypeptides of the present invention can target the protein to a specific subcellular localization, while covalent heterodimer or homodimers can increase or decrease the activity of a fusion protein. Fusion proteins can also create chimeric molecules having more than one function. Finally, fusion proteins can increase solubility and/or stability of the fused protein compared to the non-fused protein. All of the types of fusion proteins described above can be made by modifying the following protocol, which outlines the fusion of a polypeptide to an IgG molecule, or the protocol described in Example 5.

[0799] Briefly, the human Fc portion of the IgG molecule can be PCR amplified, using primers that span the 5′ and 3′ ends of the sequence described below. These primers also should have convenient restriction enzyme sites that will facilitate cloning into an expression vector, preferably a mammalian expression vector.

[0800] For example, if pC4 (ATCC Accession No. 209646) is used, the human Fc portion can be ligated into the BamHI cloning site. Note that the 3′ BamHI site should be destroyed. Next, the vector containing the human Fc portion is re-restricted with BamHI, linearizing the vector, and a polynucleotide of the present invention, isolated by the PCR protocol described in Example 1, is ligated into this BamHI site. Note that the polynucleotide is cloned without a stop codon, otherwise a fusion protein will not be produced.

[0801] If the naturally occurring signal sequence is used to produce the polypeptide of the present invention, pC4 does not need a second signal peptide. Alternatively, if the naturally occurring signal sequence is not used, the vector can be modified to include a heterologous signal sequence. (See, e.g., International Publication No. WO 96/34891.)

Human IgG Fc region:

| | |
|---|---|
| GGGATCCGGAGCCCAAATCTTCTGACAAAA | (SEQ ID NO:1) |
| CTCACACATGCCCACCGTGCCCAGCACCTGAATTCGA | |
| GGGTGCACCGTCAGTCTTCCTCTTCCCCCCAAAACCC | |
| AAGGACACCCTCATGATCTCCCGGACTCCTGAGGTCA | |
| CATGCGTGGTGGTGGACGTAAGCCACGAAGACCCTGA | |
| GGTCAAGTTCAACTGGTACGTGGACGGCGTGGAGGTG | |
| CATAATGCCAAGACAAAGCCGCGGGAGGAGCAGTACA | |
| ACAGCACGTACCGTGTGGTCAGCGTCCTCACCGTCCT | |
| GCACCAGGACTGGCTGAATGGCAAGGAGTACAAGTGC | |
| AAGGTCTCCAACAAAGCCCTCCCAACCCCCATCGAGA | |
| AAACCATCTCCAAAGCCAAAGGGCAGCCCCGAGAACC | |
| ACAGGTGTACACCCTGCCCCCATCCCGGGATGAGCTG | |
| ACCAAGAAGCAGGTCAGCCTGACCTGCCTGGTCAAAG | |
| GCTTCTATCCAAGCGACATCGCCGTGGAGTGGGAGAG | |
| CAATGGGCAGCCGGAGAACAACTACAAGACCACGCCT | |
| CCCGTGCTGGACTCCGACGGCTCCTTCTTCCTCTACA | |
| GCAAGCTCACCGTGGACAAGAGCAGGTGGCAGCAGGG | |
| GAACGTCTTCTCATGCTCCGTGATGCATGAGGGTCTG | |
| CACAACCACTACACGGAGAAGAGCCTCTCCCTGTCTC | |
| CGGGTAAATGAGTGCGACGGCCGCGACTCTAGAGGAT | |

### Example 10

### Production of an Antibody from a Polypeptide

[0802] a) Hybridoma Technology

[0803] The antibodies of the present invention can be prepared by a variety of methods. (See, Current Protocols, Chapter 2.) As one example of such methods, cells expressing a polypeptide of the present invention are administered to an animal to induce the production of sera containing polyclonal antibodies. In a preferred method, a preparation of a polypeptide of the present invention is prepared and purified to render it substantially free of natural contaminants. Such a preparation is then introduced into an animal in order to produce polyclonal antisera of greater specific activity.

[0804] Monoclonal antibodies specific for a polypeptide of the present invention are prepared using hybridoma technology (Kohler et al., Nature 256:495 (1975); Kohler et al., Eur. J. Immunol. 6:511 (1976); Kohler et al., Eur. J. Immunol. 6:292 (1976); Hammerling et al., in: Monoclonal Antibodies and T-Cell Hybridomas, Elsevier, N.Y., pp. 563-681 (1981)). In general, an animal (preferably a mouse) is immunized with a polypeptide of the present invention or, more preferably, with a secreted polypeptide-expressing cell. Such polypeptide-expressing cells are cultured in any suitable tissue culture medium, preferably in Earle's modified Eagle's medium supplemented with 10% fetal bovine serum (inactivated at about 56° C.), and supplemented with about 10 g/l of nonessential amino acids, about 1,000 U/ml of penicillin, and about 100 μg/ml of streptomycin.

[0805] The splenocytes of such mice are extracted and fused with a suitable myeloma cell line. Any suitable myeloma cell line may be employed in accordance with the present invention; however, it is preferable to employ the parent myeloma cell line (SP20), available from the ATCC. After fusion, the resulting hybridoma cells are selectively maintained in HAT medium, and then cloned by limiting dilution as described by Wands et al. (Gastroenterology 80:225-232 (1981)). The hybridoma cells obtained through such a selection are then assayed to identify clones which secrete antibodies capable of binding the polypeptide of the present invention.

[0806] Alternatively, additional antibodies capable of binding to a polypeptide of the present invention can be produced in a two-step procedure using anti-idiotypic antibodies. Such a method makes use of the fact that antibodies are themselves antigens, and therefore, it is possible to obtain an antibody which binds to a second antibody. In accordance with this method, protein specific antibodies are used to immunize an animal, preferably a mouse. The splenocytes of such an animal are then used to produce hybridoma cells, and the hybridoma cells are screened to identify clones which produce an antibody whose ability to bind to the polypeptide-specific antibody can be blocked by said polypeptide. Such antibodies comprise anti-idiotypic antibodies to the polypeptide-specific antibody and are used to immunize an animal to induce formation of further polypeptide-specific antibodies.

[0807] For in vivo use of antibodies in humans, an antibody is “humanized”. Such antibodies can be produced using genetic constructs derived from hybridoma cells producing the monoclonal antibodies described above. Methods for producing chimeric and humanized antibodies are known in the art and are discussed herein. (See, for review, Morrison, Science 229:1202 (1985); Oi et al., BioTechniques 4:214 (1986); Cabilly et al., U.S. Pat. No. 4,816,567; Taniguchi et al., EP 171496; Morrison et al., EP 173494; Neuberger et al., WO 8601533; Robinson et al., International Publication No. WO 8702671; Boulianne et al., Nature 312:643 (1984); Neuberger et al., Nature 314:268 (1985)).

[0808] b) Isolation of Antibody Fragments Directed Against a Polypeptide of the Present Invention from a Library of scFvs

[0809] Naturally occurring V-genes isolated from human PBLs are constructed into a library of antibody fragments which contain reactivities against a polypeptide of the present invention to which the donor may or may not have been exposed (see e.g., U.S. Pat. No. 5,885,793 incorporated herein by reference in its entirety).

[0810] Rescue of the Library. A library of scFvs is constructed from the RNA of human PBLs as described in International Publication No. WO 92/01047. To rescue phage displaying antibody fragments, approximately 10⁹ E. coli harboring the phagemid are used to inoculate 50 ml of 2×TY containing 1% glucose and 100 μg/ml of ampicillin (2×TY-AMP-GLU) and grown to an O.D. of 0.8 with shaking. Five ml of this culture is used to inoculate 50 ml of 2×TY-AMP-GLU, 2×108 TU of delta gene 3 helper (M13 delta gene III, see International Publication No. WO 92/01047) are added and the culture incubated at 37° C. for 45 minutes without shaking and then at 37° C. for 45 minutes with shaking. The culture is centrifuged at 4000 r.p.m. for 10 min. and the pellet resuspended in 2 liters of 2×TY containing 100 μg/ml ampicillin and 50 ug/ml kanamycin and grown overnight. Phage are prepared as described in International Publication No. WO 92/01047.

[0811] M13 delta gene III is prepared as follows: M13 delta gene III helper phage does not encode gene III protein, hence the phage(mid) displaying antibody fragments have a greater avidity of binding to antigen. Infectious M13 delta gene III particles are made by growing the helper phage in cells harboring a pUC19 derivative supplying the wild type gene III protein during phage morphogenesis. The culture is incubated for 1 hour at 37° C. without shaking and then for a further hour at 37° C. with shaking. Cells are spun down (IEC-Centra 8,400 r.p.m. for 10 min), resuspended in 300 ml 2×TY broth containing 100 μg ampicillin/ml and 25 μg kanamycin/ml (2×TY-AMP-KAN) and grown overnight, shaking at 37° C. Phage particles are purified and concentrated from the culture medium by two PEG-precipitations (Sambrook et al., 1990), resuspended in 2 ml PBS and passed through a 0.45 μm filter (Minisart NML; Sartorius) to give a final concentration of approximately 10¹³ transducing units/ml (ampicillin-resistant clones).

[0812] Panning of the Library. Immunotubes (Nunc) are coated overnight in PBS with 4 ml of either 100 μg/ml or 10 μg/ml of a polypeptide of the present invention. Tubes are blocked with 2% Marvel-PBS for 2 hours at 37° C. and then washed 3 times in PBS. Approximately 1013 TU of phage is applied to the tube and incubated for 30 minutes at room temperature tumbling on an over and under turntable and then left to stand for another 1.5 hours. Tubes are washed 10 times with PBS 0.1% Tween-20 and 10 times with PBS. Phage are eluted by adding 1 ml of 100 mM triethylamine and rotating 15 minutes on an under and over turntable after which the solution is immediately neutralized with 0.5 ml of 1.0M Tris-HCl, pH 7.4. Phage are then used to infect 10 ml of mid-log E. coli TG1 by incubating eluted phage with bacteria for 30 minutes at 37° C. The E. coli are then plated on TYE plates containing 1% glucose and 100 μg/ml ampicillin. The resulting bacterial library is then rescued with delta gene 3 helper phage as described above to prepare phage for a subsequent round of selection. This process is then repeated for a total of 4 rounds of affinity purification with tube-washing increased to 20 times with PBS, 0.1% Tween-20 and 20 times with PBS for rounds 3 and 4.

[0813] Characterization of Binders. Eluted phage from the 3rd and 4th rounds of selection are used to infect E. coli HB 2151 and soluble scFv is produced (Marks, et al., 1991) from single colonies for assay. ELISAs are performed with microtitre plates coated with either 10 pg/ml of the polypeptide of the present invention in 50 mM bicarbonate pH 9.6. Clones positive in ELISA are further characterized by PCR fingerprinting (see, e.g., International Publication No. WO 92/01047) and then by sequencing. These ELISA positive clones may also be further characterized by techniques known in the art, such as, for example, epitope mapping, binding affinity, receptor signal transduction, ability to block or competitively inhibit antibody/antigen binding, and competitive agonistic or antagonistic activity.

### Example 11

### Method of Determining Alterations in a Gene Corresponding to a Polynucleotide

[0814] RNA isolated from entire families or individual patients presenting with diabetes mellitus is isolated. cDNA is then generated from these RNA samples using protocols known in the art. (See, Sambrook.) The cDNA is then used as a template for PCR, employing primers surrounding regions of interest in SEQ ID NO:X; and/or the nucleotide sequence of the cDNA contained in ATCC Deposit No:Z. Suggested PCR conditions consist of 35 cycles at 95 degrees C. for 30 seconds; 60-120 seconds at 52-58 degrees C.; and 60-120 seconds at 70 degrees C., using buffer solutions described in Sidransky et al., Science 252:706 (1991).

[0815] PCR products are then sequenced using primers labeled at their 5′ end with T4 polynucleotide kinase, employing SequiTherm Polymerase (Epicentre Technologies). The intron-exon boundaries of selected exons is also determined and genomic PCR products analyzed to confirm the results. PCR products harboring suspected mutations are then cloned and sequenced to validate the results of the direct sequencing.

[0816] PCR products are cloned into T-tailed vectors as described in Holton et al., Nucleic Acids Research, 19:1156 (1991) and sequenced with T7 polymerase (United States Biochemical). Affected individuals are identified by mutations not present in unaffected individuals.

[0817] Genomic rearrangements are also observed as a method of determining alterations in a gene corresponding to a polynucleotide. Genomic clones isolated according to Example 2 are nick-translated with digoxigenindeoxy-uridine 5′-triphosphate (Boehringer Manheim), and FISH performed as described in Johnson et al., Methods Cell Biol. 35:73-99 (1991). Hybridization with the labeled probe is carried out using a vast excess of human cot-1 DNA for specific hybridization to the corresponding genomic locus.

[0818] Chromosomes are counterstained with 4,6-diamino-2-phenylidole and propidium iodide, producing a combination of C- and R-bands. Aligned images for precise mapping are obtained using a triple-band filter set (Chroma Technology, Brattleboro, Vt.) in combination with a cooled charge-coupled device camera (Photometrics, Tucson, Ariz.) and variable excitation wavelength filters. (Johnson et al., Genet. Anal. Tech. Appl., 8:75 (1991)). Image collection, analysis and chromosomal fractional length measurements are performed using the ISee Graphical Program System. (Inovision Corporation, Durham, N.C.) Chromosome alterations of the genomic region hybridized by the probe are identified as insertions, deletions, and translocations. These alterations are used as a diagnostic marker for an associated disease.

### Example 12

### Method of Detecting Abnormal Levels of a Polypeptide in a Biological Sample

[0819] A polypeptide of the present invention can be detected in a biological sample, and if an increased or decreased level of the polypeptide is detected, this polypeptide is a marker for a particular phenotype. Methods of detection are numerous, and thus, it is understood that one skilled in the art can modify the following assay to fit their particular needs.

[0820] For example, antibody-sandwich ELISAs are used to detect polypeptides in a sample, preferably a biological sample. Wells of a microtiter plate are coated with specific antibodies, at a final concentration of 0.2 to 10 ug/ml. The antibodies are either monoclonal or polyclonal and are produced by the method described in Example 10. The wells are blocked so that non-specific binding of the polypeptide to the well is reduced.

[0821] The coated wells are then incubated for >2 hours at RT with a sample containing the polypeptide. Preferably, serial dilutions of the sample should be used to validate results. The plates are then washed three times with deionized or distilled water to remove unbound polypeptide.

[0822] Next, 50 ul of specific antibody-alkaline phosphatase conjugate, at a concentration of 25-400 ng, is added and incubated for 2 hours at room temperature. The plates are again washed three times with deionized or distilled water to remove unbound conjugate.

[0823] Add 75 ul of 4-methylumbelliferyl phosphate (MUP) or p-nitrophenyl phosphate (NPP) substrate solution to each well and incubate 1 hour at room temperature. Measure the reaction by a microtiter plate reader. Prepare a standard curve, using serial dilutions of a control sample, and plot polypeptide concentration on the X-axis (log scale) and fluorescence or absorbance of the Y-axis (linear scale). Interpolate the concentration of the polypeptide in the sample using the standard curve.

### Example 13

### Formulation

[0824] The invention also provides methods of preventing, treating and/or ameliorating diabetes mellitus by administration to a subject of an effective amount of a Therapeutic. By therapeutic is meant polynucleotides or polypeptides of the invention (including fragments and variants), agonists or antagonists thereof, and/or antibodies thereto, in combination with a pharmaceutically acceptable carrier type (e.g., a sterile carrier).

[0825] The Therapeutic will be formulated and dosed in a fashion consistent with good medical practice, taking into account the clinical condition of the individual patient (especially the side effects of treatment with the Therapeutic alone), the site of delivery, the method of administration, the scheduling of administration, and other factors known to practitioners. The “effective amount” for purposes herein is thus determined by such considerations.

[0826] As a general proposition, the total pharmaceutically effective amount of the Therapeutic administered parenterally per dose will be in the range of about 1 ug/kg/day to 10 mg/kg/day of patient body weight, although, as noted above, this will be subject to therapeutic discretion. More preferably, this dose is at least 0.01 mg/kg/day, and most preferably for humans between about 0.01 and 1 mg/kg/day for the hormone. If given continuously, the Therapeutic is typically administered at a dose rate of about 1 ug/kg/hour to about 50 ug/kg/hour, either by 1-4 injections per day or by continuous subcutaneous infusions, for example, using a mini-pump. An intravenous bag solution may also be employed. The length of treatment needed to observe changes and the interval following treatment for responses to occur appears to vary depending on the desired effect.

[0827] Therapeutics can be are administered orally, rectally, parenterally, intracistemally, intravaginally, intraperitoneally, topically (as by powders, ointments, gels, drops or transdermal patch), bucally, or as an oral or nasal spray. “Pharmaceutically acceptable carrier” refers to a non-toxic solid, semisolid or liquid filler, diluent, encapsulating material or formulation auxiliary of any. The term “parenteral” as used herein refers to modes of administration which include intravenous, intramuscular, intraperitoneal, intrasternal, subcutaneous and intraarticular injection and infusion.

[0828] Therapeutics of the invention are also suitably administered by sustained-release systems. Suitable examples of sustained-release Therapeutics are administered orally, rectally, parenterally, intracistemally, intravaginally, intraperitoneally, topically (as by powders, ointments, gels, drops or transdermal patch), bucally, or as an oral or nasal spray. “Pharmaceutically acceptable carrier” refers to a non-toxic solid, semisolid or liquid filler, diluent, encapsulating material or formulation auxiliary of any type. The term “parenteral” as used herein refers to modes of administration which include intravenous, intramuscular, intraperitoneal, intrasternal, subcutaneous and intraarticular injection and infusion.

[0829] Therapeutics of the invention are also suitably administered by sustained-release systems. Suitable examples of sustained-release Therapeutics include suitable polymeric materials (such as, for example, semi-permeable polymer matrices in the form of shaped articles, e.g., films, or mirocapsules), suitable hydrophobic materials (for example as an emulsion in an acceptable oil) or ion exchange resins, and sparingly soluble derivatives (such as, for example, a sparingly soluble salt).

[0830] Sustained-release matrices include polylactides (U.S. Pat. No. 3,773,919, EP 58,481), copolymers of L-glutamic acid and gamma-ethyl-L-glutamate (Sidman et al., Biopolymers 22:547-556 (1983)), poly (2-hydroxyethyl methacrylate) (Langer et al., J. Biomed. Mater. Res. 15:167-277 (1981), and Langer, Chem. Tech. 12:98-105 (1982)), ethylene vinyl acetate (Langer et al., Id.) or poly-D-(−)-3-hydroxybutyric acid (EP 133,988).

[0831] In a preferred embodiment, polypeptide, polynucleotide, and antibody compositions of the invention are formulated in a biodegradable, polymeric drug delivery system, for example as described in U.S. Pat. Nos. 4,938,763; 5,278,201; 5,278,202; 5,324,519; 5,340,849; and 5,487,897 and in International Publication Numbers WO01/35929, WO00/24374, and WO00/06117 which are hereby incorporated by reference in their entirety. In specific preferred embodiments the polypeptide, polynucleotide, and antibody compositions of the invention are formulated using the ATRIGEL® Biodegradable System of Atrix Laboratories, Inc. (Fort Collins, Colo.).

[0832] Examples of biodegradable polymers which can be used in the formulation of polypeptide, polynucleotide, and antibody compositions, include but are not limited to, polylactides, polyglycolides, polycaprolactones, polyanhydrides, polyamides, polyurethanes, polyesteramides, polyorthoesters, polydioxanones, polyacetals, polyketals, polycarbonates, polyorthocarbonates, polyphosphazenes, polyhydroxybutyrates, polyhydroxyvalerates, polyalkylene oxalates, polyalkylene succinates, poly(malic acid), poly(amino acids), poly(methyl vinyl ether), poly(maleic anhydride), polyvinylpyrrolidone, polyethylene glycol, polyhydroxycellulose, chitin, chitosan, and copolymers, terpolymers, or combinations or mixtures of the above materials. The preferred polymers are those that have a lower degree of crystallization and are more hydrophobic. These polymers and copolymers are more soluble in the biocompatible solvents than the highly crystalline polymers such as polyglycolide and chitin which also have a high degree of hydrogen-bonding. Preferred materials with the desired solubility parameters are the polylactides, polycaprolactones, and copolymers of these with glycolide in which there are more amorphous regions to enhance solubility. In specific preferred embodiments, the biodegradable polymers which can be used in the formulation of polypeptide, polynucleotide, and antibody compositions are poly(lactide-co-glycolides). Polymer properties such as molecular weight, hydrophobicity, and lactide/glycolide ratio may be modified to obtain the desired polypeptide, polynucleotide, or antibody release profile (See, e.g., Ravivarapu et al., Journal of Pharmaceutical Sciences 89:732-741 (2000), which is hereby incorporated by reference in its entirety).

[0833] It is also preferred that the solvent for the biodegradable polymer be non-toxic, water miscible, and otherwise biocompatible. Examples of such solvents include, but are not limited to, N-methyl-2-pyrrolidone, 2-pyrrolidone, C2 to C6 alkanols, C1 to C15 alchohols, dils, triols, and tetraols such as ethanol, glycerine propylene glycol, butanol; C3 to C15 alkyl ketones such as acetone, diethyl ketone and methyl ethyl ketone; C3 to C15 esters such as methyl acetate, ethyl acetate, ethyl lactate; alkyl ketones such as methyl ethyl ketone, C1 to C15 amides such as dimethylformamide, dimethylacetamide and caprolactam; C3 to C20 ethers such as tetrahydrofuran, or solketal; tweens, triacetin, propylene carbonate, decylmethylsulfoxide, dimethyl sulfoxide, oleic acid, 1-dodecylazacycloheptan-2-one, Other preferred solvents are benzyl alchohol, benzyl benzoate, dipropylene glycol, tributyrin, ethyl oleate, glycerin, glycofural, isopropyl myristate, isopropyl palmitate, oleic acid, polyethylene glycol, propylene carbonate, and triethyl citrate. The most preferred solvents are N-methyl-2-pyrrolidone, 2-pyrrolidone, dimethyl sulfoxide, triacetin, and propylene carbonate because of the solvating ability and their compatibility.

[0834] Additionally, formulations comprising polypeptide, polynucleotide, and antibody compositions and a biodegradable polymer may also include release-rate modification agents and/or pore-forming agents. Examples of release-rate modification agents include, but are not limited to, fatty acids, triglycerides, other like hydrophobic compounds, organic solvents, plasticizing compounds and hydrophilic compounds. Suitable release rate modification agents include, for example, esters of mono-, di-, and tricarboxylic acids, such as 2-ethoxyethyl acetate, methyl acetate, ethyl acetate, diethyl phthalate, dimethyl phthalate, dibutyl phthalate, dimethyl adipate, dimethyl succinate, dimethyl oxalate, dimethyl citrate, triethyl citrate, acetyl tributyl citrate, acetyl triethyl citrate, glycerol triacetate, di(n-butyl)sebecate, and the like; polyhydroxy alcohols, such as propylene glycol, polyethylene glycol, glycerin, sorbitol, and the like; fatty acids; triesters of glycerol, such as triglycerides, epoxidized soybean oil, and other epoxidized vegetable oils; sterols, such as cholesterol; alcohols, such as C.sub.6-C.sub.12 alkanols, 2-ethoxyethanol. The release rate modification agent may be used singly or in combination with other such agents. Suitable combinations of release rate modification agents include, but are not limited to, glycerin/propylene glycol, sorbitol/glycerine, ethylene oxide/propylene oxide, butylene glycol/adipic acid, and the like. Preferred release rate modification agents include, but are not limited to, dimethyl citrate, triethyl citrate, ethyl heptanoate, glycerin, and hexanediol. Suitable pore-forming agents that may be used in the polymer composition include, but are not limited to, sugars such as sucrose and dextrose, salts such as sodium chloride and sodium carbonate, polymers such as hydroxylpropylcellulose, carboxymethylcellulose, polyethylene glycol, and polyvinylpyrrolidone. Solid crystals that will provide a defined pore size, such as salt or sugar, are preferred.

[0835] In specific preferred embodiments the polypeptide, polynucleotide, and antibody compositions of the invention are formulated using the BEMA™ BioErodible Mucoadhesive System, MCA™ MucoCutaneous Absorption System, SMP™ Solvent MicroParticle System, or BCP™ BioCompatible Polymer System of Atrix Laboratories, Inc. (Fort Collins, Colo.).

[0836] Sustained-release Therapeutics also include liposomally entrapped Therapeutics of the invention (see generally, Langer, Science 249:1527-1533 (1990); Treat et al., in Liposomes in the Therapy of Infectious Disease and Cancer, Lopez-Berestein and Fidler (eds.), Liss, New York, pp. 317-327 and 353-365 (1989)). Liposomes containing the Therapeutic are prepared by methods known per se: DE 3,218,121; Epstein et al., Proc. Natl. Acad. Sci. (USA) 82:3688-3692 (1985); Hwang et al., Proc. Natl. Acad. Sci. (USA) 77:4030-4034 (1980); EP 52,322; EP 36,676; EP 88,046; EP 143,949; EP 142,641; Japanese Pat. Appl. 83-118008; U.S. Pat. Nos. 4,485,045 and 4,544,545; and EP 102,324. Ordinarily, the liposomes are of the small (about 200-800 Angstroms) unilamellar type in which the lipid content is greater than about 30 mol. percent cholesterol, the selected proportion being adjusted for the optimal Therapeutic.

[0837] In yet an additional embodiment, the Therapeutics of the invention are delivered by way of a pump (see Langer, supra; Sefton, CRC Crit. Ref. Biomed. Eng. 14:201 (1987); Buchwald et al., Surgery 88:507 (1980); Saudek et al., N. Engl. J. Med. 321:574 (1989)).

[0838] Other controlled release systems are discussed in the review by Langer (Science 249:1527-1533 (1990)).

[0839] For parenteral administration, in one embodiment, the Therapeutic is formulated generally by mixing it at the desired degree of purity, in a unit dosage injectable form (solution, suspension, or emulsion), with a pharmaceutically acceptable carrier, i.e., one that is non-toxic to recipients at the dosages and concentrations employed and is compatible with other ingredients of the formulation. For example, the formulation preferably does not include oxidizing agents and other compounds that are known to be deleterious to the Therapeutic.

[0840] Generally, the formulations are prepared by contacting the Therapeutic uniformly and intimately with liquid carriers or finely divided solid carriers or both. Then, if necessary, the product is shaped into the desired formulation. Preferably the carrier is a parenteral carrier, more preferably a solution that is isotonic with the blood of the recipient. Examples of such carrier vehicles include water, saline, Ringer's solution, and dextrose solution. Non-aqueous vehicles such as fixed oils and ethyl oleate are also useful herein, as well as liposomes.

[0841] The carrier suitably contains minor amounts of additives such as substances that enhance isotonicity and chemical stability. Such materials are non-toxic to recipients at the dosages and concentrations employed, and include buffers such as phosphate, citrate, succinate, acetic acid, and other organic acids or their salts; antioxidants such as ascorbic acid; low molecular weight (less than about ten residues) polypeptides, e.g., polyarginine or tripeptides; proteins, such as serum albumin, gelatin, or immunoglobulins; hydrophilic polymers such as polyvinylpyrrolidone; amino acids, such as glycine, glutamic acid, aspartic acid, or arginine; monosaccharides, disaccharides, and other carbohydrates including cellulose or its derivatives, glucose, manose, or dextrins; chelating agents such as EDTA; sugar alcohols such as mannitol or sorbitol; counterions such as sodium; and/or nonionic surfactants such as polysorbates, poloxamers, or PEG.

[0842] The Therapeutic is typically formulated in such vehicles at a concentration of about 0.1 mg/ml to 100 mg/ml, preferably 1-10 mg/ml, at a pH of about 3 to 8. It will be understood that the use of certain of the foregoing excipients, carriers, or stabilizers will result in the formation of polypeptide salts.

[0843] Any pharmaceutical used for therapeutic administration can be sterile. Sterility is readily accomplished by filtration through sterile filtration membranes (e.g., 0.2 micron membranes). Therapeutics generally are placed into a container having a sterile access port, for example, an intravenous solution bag or vial having a stopper pierceable by a hypodermic injection needle.

[0844] Therapeutics ordinarily will be stored in unit or multi-dose containers, for example, sealed ampoules or vials, as an aqueous solution or as a lyophilized formulation for reconstitution. As an example of a lyophilized formulation, 10-ml vials are filled with 5 ml of sterile-filtered 1% (w/v) aqueous Therapeutic solution, and the resulting mixture is lyophilized. The infusion solution is prepared by reconstituting the lyophilized Therapeutic using bacteriostatic Water-for-Injection.

[0845] The invention also provides a pharmaceutical pack or kit comprising one or more containers filled with one or more of the ingredients of the Therapeutics of the invention. Associated with such container(s) can be a notice in the form prescribed by a governmental agency regulating the manufacture, use or sale of pharmaceuticals or biological products, which notice reflects approval by the agency of manufacture, use or sale for human administration. In addition, the Therapeutics may be employed in conjunction with other therapeutic compounds.

[0846] The Therapeutics of the invention may be administered alone or in combination with adjuvants. Adjuvants that may be administered with the Therapeutics of the invention include, but are not limited to, alum, alum plus deoxycholate (ImmunoAg), MTP-PE (Biocine Corp.), QS21 (Genentech, Inc.), BCG (e.g., THERACYS®), MPL and nonviable prepartions of Corynebacterium parvum. In a specific embodiment, Therapeutics of the invention are administered in combination with alum. In another specific embodiment, Therapeutics of the invention are administered in combination with QS-21. Further adjuvants that may be administered with the Therapeutics of the invention include, but are not limited to, Monophosphoryl lipid immunomodulator, AdjuVax 100a, QS-21, QS-18, CRL1005, Aluminum salts, MF-59, and Virosomal adjuvant technology. Vaccines that may be administered with the Therapeutics of the invention include, but are not limited to, vaccines directed toward protection against MMR (measles, mumps, rubella), polio, varicella, tetanus/diptheria, hepatitis A, hepatitis B, haemophilus influenzae B, whooping cough, pneumonia, influenza, Lyme's Disease, rotavirus, cholera, yellow fever, Japanese encephalitis, poliomyelitis, rabies, typhoid fever, and pertussis. Combinations may be administered either concomitantly, e.g., as an admixture, separately but simultaneously or concurrently; or sequentially. This includes presentations in which the combined agents are administered together as a therapeutic mixture, and also procedures in which the combined agents are administered separately but simultaneously, e.g., as through separate intravenous lines into the same individual. Administration “in combination” further includes the separate administration of one of the compounds or agents given first, followed by the second.

[0847] The Therapeutics of the invention may be administered alone or in combination with other therapeutic agents. Therapeutic agents that may be administered in combination with the Therapeutics of the invention, include but not limited to, chemotherapeutic agents, antibiotics, steroidal and non-steroidal anti-inflammatories, conventional immunotherapeutic agents, and/or therapeutic treatments described below. Combinations may be administered either concomitantly, e.g., as an admixture, separately but simultaneously or concurrently; or sequentially. This includes presentations in which the combined agents are administered together as a therapeutic mixture, and also procedures in which the combined agents are administered separately but simultaneously, e.g., as through separate intravenous lines into the same individual. Administration “in combination” further includes the separate administration of one of the compounds or agents given first, followed by the second.

[0848] In one embodiment, the Therapeutics of the invention are administered in combination with an anticoagulant. Anticoagulants that may be administered with the compositions of the invention include, but are not limited to, heparin, low molecular weight heparin, warfarin sodium (e.g., COUMADIN®), dicumarol, 4-hydroxycoumarin, anisindione (e.g., MIRADON™), acenocoumarol (e.g., nicoumalone, SINTHROME™), indan-1,3-dione, phenprocoumon (e.g., MARCUMAR™), ethyl biscoumacetate (e.g., TROMEXAN™), and aspirin. In a specific embodiment, compositions of the invention are administered in combination with heparin and/or warfarin. In another specific embodiment, compositions of the invention are administered in combination with warfarin. In another specific embodiment, compositions of the invention are administered in combination with warfarin and aspirin. In another specific embodiment, compositions of the invention are administered in combination with heparin. In another specific embodiment, compositions of the invention are administered in combination with heparin and aspirin.

[0849] In another embodiment, the Therapeutics of the invention are administered in combination with thrombolytic drugs. Thrombolytic drugs that may be administered with the compositions of the invention include, but are not limited to, plasminogen, lys-plasminogen, alpha2-antiplasmin, streptokinae (e.g., KABIKINASE™), antiresplace (e.g., EMINASE™), tissue plasminogen activator (t-PA, altevase, ACTIVASE™), urokinase (e.g., ABBOKINASE™), sauruplase, (Prourokinase, single chain urokinase), and aminocaproic acid (e.g., AMICAR™). In a specific embodiment, compositions of the invention are administered in combination with tissue plasminogen activator and aspirin.

[0850] In another embodiment, the Therapeutics of the invention are administered in combination with antiplatelet drugs. Antiplatelet drugs that may be administered with the compositions of the invention include, but are not limited to, aspirin, dipyridamole (e.g., PERSANTINE™), and ticlopidine (e.g., TICLID™).

[0851] In specific embodiments, the use of anti-coagulants, thrombolytic and/or antiplatelet drugs in combination with Therapeutics of the invention is contemplated for the detection, prevention, diagnosis, prognostication, treatment, and/or amelioration of thrombosis, arterial thrombosis, venous thrombosis, thromboembolism, pulmonary embolism, atherosclerosis, myocardial infarction, transient ischemic attack, unstable angina. In specific embodiments, the use of anticoagulants, thrombolytic drugs and/or antiplatelet drugs in combination with Therapeutics of the invention is contemplated for the prevention of occulsion of saphenous grafts, for reducing the risk of periprocedural thrombosis as might accompany angioplasty procedures, for reducing the risk of stroke in patients with atrial fibrillation including nonrheumatic atrial fibrillation, for reducing the risk of embolism associated with mechanical heart valves and or mitral valves disease. Other uses for the therapeutics of the invention, alone or in combination with antiplatelet, anticoagulant, and/or thrombolytic drugs, include, but are not limited to, the prevention of occlusions in extracorporeal devices (e.g., intravascular canulas, vascular access shunts in hemodialysis patients, hemodialysis machines, and cardiopulmonary bypass machines).

[0852] In certain embodiments, Therapeutics of the invention are administered in combination with antiretroviral agents, nucleoside/nucleotide reverse transcriptase inhibitors (NRTIs), non-nucleoside reverse transcriptase inhibitors (NNRTIs), and/or protease inhibitors (PIs). NRTIs that may be administered in combination with the Therapeutics of the invention, include, but are not limited to, RETROVIR™ (zidovudine/AZT), VIDEX™ (didanosine/ddI), HIVID™ (zalcitabine/ddC), ZERIT™ (stavudine/d4T), EPIVIR™ (lamivudine/3TC), and COMBVIR™ (zidovudine/lamivudine). NNRTIs that may be administered in combination with the Therapeutics of the invention, include, but are not limited to, VIRAMUNE™ (nevirapine), RESCRIPTOR™ (delavirdine), and SUSTIVA™ (efavirenz). Protease inhibitors that may be administered in combination with the Therapeutics of the invention, include, but are not limited to, CRIXVAN™ (indinavir), NORVIR™ (ritonavir), INVIRASE™ (saquinavir), and VIRACEPT™ (nelfinavir). In a specific embodiment, antiretroviral agents, nucleoside reverse transcriptase inhibitors, non-nucleoside reverse transcriptase inhibitors, and/or protease inhibitors may be used in any combination with Therapeutics of the invention to treat AIDS and/or to prevent or treat HIV infection.

[0853] Additional NRTIs include LODENOSINE™ (F-ddA; an acid-stable adenosine NRTI; Triangle/Abbott; COVIRACIL™ (emtricitabine/FTC; structurally related to lamivudine (3TC) but with 3- to 10-fold greater activity in vitro; Triangle/Abbott); dOTC (BCH-10652, also structurally related to lamivudine but retains activity against a substantial proportion of lamivudine-resistant isolates; Biochem Pharma); Adefovir (refused approval for anti-HIV therapy by FDA; Gilead Sciences); PREVEON® (Adefovir Dipivoxil, the active prodrug of adefovir; its active form is PMEA-pp); TENOFOVIR™ (bis-POC PMPA, a PMPA prodrug; Gilead); DAPD/DXG (active metabolite of DAPD; Triangle/Abbott); D-D4FC (related to 3TC, with activity against AZT/3TC-resistant virus); GW420867X (Glaxo Wellcome); ZIAGEN™ (abacavir/159U89; Glaxo Wellcome Inc.); CS-87 (3′azido-2′,3′-dideoxyuridine; WO 99/66936); and S-acyl-2-thioethyl (SATE)-bearing prodrug forms of β-L-FD4C and β-L-FddC (WO 98/17281).

[0854] Additional NNRTIs include COACTINON™ (Emivirine/MKC-442, potent NNRTI of the HEPT class; Triangle/Abbott); CAPRAVIRINE™ (AG-1549/S-1153, a next generation NNRTI with activity against viruses containing the K103N mutation; Agouron); PNU-142721 (has 20- to 50-fold greater activity than its predecessor delavirdine and is active against K103N mutants; Pharmacia & Upjohn); DPC-961 and DPC-963 (second-generation derivatives of efavirenz, designed to be active against viruses with the K103N mutation; DuPont); GW-420867X (has 25-fold greater activity than HBY097 and is active against K103N mutants; Glaxo Wellcome); CALANOLIDE A (naturally occurring agent from the latex tree; active against viruses containing either or both the Y181C and K103N mutations); and Propolis (WO 99/49830).

[0855] Additional protease inhibitors include LOPINAVIR™ (ABT378/r; Abbott Laboratories); BMS-232632 (an azapeptide; Bristol-Myres Squibb); TIPRANAVIR™ (PNU-140690, a non-peptic dihydropyrone; Pharmacia & Upjohn); PD-178390 (a nonpeptidic dihydropyrone; Parke-Davis); BMS 232632 (an azapeptide; Bristol-Myers Squibb); L-756,423 (an indinavir analog; Merck); DMP450 (a cyclic urea compound; Avid & DuPont); AG-1776 (a peptidomimetic with in vitro activity against protease inhibitor-resistant viruses; Agouron); VX-175/GW-433908 (phosphate prodrug of amprenavir; Vertex & Glaxo Welcome); CGP61755 (Ciba); and AGENERASE™ (amprenavir; Glaxo Wellcome Inc.).

[0856] Additional antiretroviral agents include fusion inhibitors/gp41 binders. Fusion inhibitors/gp41 binders include T-20 (a peptide from residues 643-678 of the HW gp41 transmembrane protein ectodomain which binds to gp41 in its resting state and prevents transformation to the fusogenic state; Trimeris) and T-1249 (a second-generation fusion inhibitor; Trimeris).

[0857] Additional antiretroviral agents include fusion inhibitors/chemokine receptor antagonists. Fusion inhibitors/chemokine receptor antagonists include CXCR4 antagonists such as AMD 3100 (a bicyclam), SDF-1 and its analogs, and ALX40-4C (a cationic peptide), T22 (an 18 amino acid peptide; Trimeris) and the T22 analogs T134 and T140; CCR5 antagonists such as RANTES (9-68), AOP-RANTES, NNY-RANTES, and TAK-779; and CCR5/CXCR4 antagonists such as NSC 651016 (a distamycin analog). Also included are CCR2B, CCR3, and CCR6 antagonists. Chemokine recpetor agonists such as RANTES, SDF-1, MIP-1α, MIP-1β, etc., may also inhibit fusion.

[0858] Additional antiretroviral agents include integrase inhibitors. Integrase inhibitors include dicaffeoylquinic (DFQA) acids; L-chicoric acid (a dicaffeoyltartaric (DCTA) acid); quinalizarin (QLC) and related anthraquinones; ZINTEVIR™ (AR 177, an oligonucleotide that probably acts at cell surface rather than being a true integrase inhibitor; Arondex); and naphthols such as those disclosed in WO 98/50347.

[0859] Additional antiretroviral agents include hydroxyurea-like compunds such as BCX-34 (a purine nucleoside phosphorylase inhibitor; Biocryst); ribonucleotide reductase inhibitors such as DIDOX™ (Molecules for Health); inosine monophosphate dehydrogenase (IMPDH) inhibitors sucha as VX-497 (Vertex); and mycopholic acids such as CellCept (mycophenolate mofetil; Roche).

[0860] Additional antiretroviral agents include inhibitors of viral integrase, inhibitors of viral genome nuclear translocation such as arylene bis(methylketone) compounds; inhibitors of HIV entry such as AOP-RANTES, NNY-RANTES, RANTES-IgG fusion protein, soluble complexes of RANTES and glycosaminoglycans (GAG), and AMD-3100; nucleocapsid zinc finger inhibitors such as dithiane compounds; targets of HIV Tat and Rev; and pharmacoenhancers such as ABT-378.

[0861] Other antiretroviral therapies and adjunct therapies include cytokines and lymphokines such as MIP-1α, MIP-1β, SDF-1α, IL-2, PROLEUKIN™ (aldesleukin/L2-7001; Chiron), IL-4, IL-10, IL-12, and IL-13; interferons such as IFN-α2a; antagonists of TNFs, NFκB, GM-CSF, M-CSF, and IL-10; agents that modulate immune activation such as cyclosporin and prednisone; vaccines such as Remune™ (HIV Immunogen), APL 400-003 (Apollon), recombinant gp120 and fragments, bivalent (B/E) recombinant envelope glycoprotein, rgp120CM235, MN rgp120, SF-2 rgp120, gp120/soluble CD4 complex, Delta JR-FL protein, branched synthetic peptide derived from discontinuous gp120 C3/C4 domain, fusion-competent immunogens, and Gag, Pol, Nef, and Tat vaccines; gene-based therapies such as genetic suppressor elements (GSEs; WO 98/54366), and intrakines (genetically modified CC chemokines targetted to the ER to block surface expression of newly synthesized CCR5 (Yang et al., PNAS 94:11567-72 (1997); Chen et al., Nat. Med. 3:1110-16 (1997)); antibodies such as the anti-CXCR4 antibody 12G5, the anti-CCR5 antibodies 2D7, 5C7, PA8, PA9, PA10, PA11, PA12, and PA14, the anti-CD4 antibodies Q4120 and RPA-T4, the anti-CCR3 antibody 7B11, the anti-gp120 antibodies 17b, 48d, 447-52D, 257-D, 268-D and 50.1, anti-Tat antibodies, anti-TNF-α antibodies, and monoclonal antibody 33A; aryl hydrocarbon (AH) receptor agonists and antagonists such as TCDD, 3,3′,4,4′,5-pentachlorobiphenyl, 3,3′,4,4′-tetrachlorobiphenyl, and α-naphthoflavone (WO 98/30213); and antioxidants such as γ-L-glutamyl-L-cysteine ethyl ester (γ-GCE; WO 99/56764).

[0862] In a further embodiment, the Therapeutics of the invention are administered in combination with an antiviral agent. Antiviral agents that may be administered with the Therapeutics of the invention include, but are not limited to, acyclovir, ribavirin, amantadine, and remantidine.

[0863] In other embodiments, Therapeutics of the invention may be administered in combination with anti-opportunistic infection agents. Anti-opportunistic agents that may be administered in combination with the Therapeutics of the invention, include, but are not limited to, TRIMETHOPRIM-SULFAMETHOXAZOLE™, DAPSONE™, PENTAMIDINE™, ATOVAQUONE™, ISONIAZID™, RIFAMPIN™, PYRAZINAMIDE™, ETHAMBUTOL™, RIFABUTIN™, CLARITHROMYCIN™, AZITHROMYCIN™, GANCICLOVIR™, FOSCARNET™, CIDOFOVIR™, FLUCONAZOLE™, ITRACONAZOLE™, KETOCONAZOLE™, ACYCLOVIR™, FAMCICOLVIR™, PYRIMETHAMINE™, LEUCOVORIN™, NEUPOGEN™ (filgrastim/G-CSF), and LEUKINE™ (sargramostim/GM-CSF). In a specific embodiment, Therapeutics of the invention are used in any combination with TRIMETHOPRIM-SULFAMETHOXAZOLE™, DAPSONE™, PENTAMIDINE™, and/or ATOVAQUONE™ to prophylactically treat or prevent an opportunistic Pneumocystis carinii pneumonia infection. In another specific embodiment, Therapeutics of the invention are used in any combination with ISONIAZID™, RIFAMPIN™, PYRAZINAMIDE™, and/or ETHAMBUTOL™ to prophylactically treat or prevent an opportunistic Mycobacterium avium complex infection. In another specific embodiment, Therapeutics of the invention are used in any combination with RIFABUTIN™, CLARITHROMYCIN™, and/or AZITHROMYCIN™ to prophylactically treat or prevent an opportunistic Mycobacterium tuberculosis infection. In another specific embodiment, Therapeutics of the invention are used in any combination with GANCICLOVIR™, FOSCARNET™, and/or CIDOFOVIR™ to prophylactically treat or prevent an opportunistic cytomegalovirus infection. In another specific embodiment, Therapeutics of the invention are used in any combination with FLUCONAZOLE™, ITRACONAZOLE™, and/or KETOCONAZOLE™ to prophylactically treat or prevent an opportunistic fungal infection. In another specific embodiment, Therapeutics of the invention are used in any combination with ACYCLOVIR™ and/or FAMCICOLVIR™ to prophylactically treat or prevent an opportunistic herpes simplex virus type I and/or type II infection. In another specific embodiment, Therapeutics of the invention are used in any combination with PYRIMETHAMINE™ and/or LEUCOVORIN™ to prophylactically treat or prevent an opportunistic Toxoplasma gondii infection. In another specific embodiment, Therapeutics of the invention are used in any combination with LEUCOVORIN™ and/or NEUPOGEN™ to prophylactically treat or prevent an opportunistic bacterial infection.

[0864] In a further embodiment, the Therapeutics of the invention are administered in combination with an antibiotic agent. Antibiotic agents that may be administered with the Therapeutics of the invention include, but are not limited to, amoxicillin, beta-lactamases, aminoglycosides, beta-lactam (glycopeptide), beta-lactamases, Clindamycin, chloramphenicol, cephalosporins, ciprofloxacin, erythromycin, fluoroquinolones, macrolides, metronidazole, penicillins, quinolones, rapamycin, rifampin, streptomycin, sulfonamide, tetracyclines, trimethoprim, trimethoprim-sulfamethoxazole, and vancomycin.

[0865] In other embodiments, the Therapeutics of the invention are administered in combination with immunestimulants. Immunostimulants that may be administered in combination with the Therapeutics of the invention include, but are not limited to, levamisole (e.g., ERGAMISOL™), isoprinosine (e.g. INOSIPLEX™), interferons (e.g. interferon alpha), and interleukins (e.g., IL-2).

[0866] In other embodiments, Therapeutics of the invention are administered in combination with immunosuppressive agents. Immunosuppressive agents that may be administered in combination with the Therapeutics of the invention include, but are not limited to, steroids, cyclosporine, cyclosporine analogs, cyclophosphamide methylprednisone, prednisone, azathioprine, FK-506, 15-deoxyspergualin, and other immunosuppressive agents that act by suppressing the function of responding T cells. Other immunosuppressive agents that may be administered in combination with the Therapeutics of the invention include, but are not limited to, prednisolone, methotrexate, thalidomide, methoxsalen, rapamycin, leflunomide, mizoribine (BREDININ™), brequinar, deoxyspergualin, and azaspirane (SKF 105685), ORTHOCLONE OKT® 3 (muromonab-CD3), SANDIMMUNE™, NEORAL™, SANGDYA™ (cyclosporine), PROGRAF® (FK506, tacrolimus), CELLCEPT® (mycophenolate motefil, of which the active metabolite is mycophenolic acid), IMURAN™ (azathioprine), glucocorticosteroids, adrenocortical steroids such as DELTASONE™ (prednisone) and HYDELTRASOL™ (prednisolone), FOLEX™ and MEXATE™ (methotrxate), OXSORALEN-ULTRA™ (methoxsalen) and RAPAMUNE™ (sirolimus). In a specific embodiment, immunosuppressants may be used to prevent rejection of organ or bone marrow transplantation.

[0867] In an additional embodiment, Therapeutics of the invention are administered alone or in combination with one or more intravenous immune globulin preparations. Intravenous immune globulin preparations that may be administered with the Therapeutics of the invention include, but not limited to, GAMMAR™, IVEEGAM™, SANDOGLOBULIN™, GAMMAGARD S/D™, ATGAM™ (antithymocyte glubulin), and GAMIMUNE™. In a specific embodiment, Therapeutics of the invention are administered in combination with intravenous immune globulin preparations in transplantation therapy (e.g., bone marrow transplant).

[0868] In certain embodiments, the Therapeutics of the invention are administered alone or in combination with an anti-inflammatory agent. Anti-inflammatory agents that may be administered with the Therapeutics of the invention include, but are not limited to, corticosteroids (e.g. betamethasone, budesonide, cortisone, dexamethasone, hydrocortisone, methylprednisolone, prednisolone, prednisone, and triamcinolone), nonsteroidal anti-inflammatory drugs (e.g., diclofenac, diflunisal, etodolac, fenoprofen, floctafenine, flurbiprofen, ibuprofen, indomethacin, ketoprofen, meclofenamate, mefenamic acid, meloxicam, nabumetone, naproxen, oxaprozin, phenylbutazone, piroxicam, sulindac, tenoxicam, tiaprofenic acid, and tolmetin.), as well as antihistamines, aminoarylcarboxylic acid derivatives, arylacetic acid derivatives, arylbutyric acid derivatives, arylcarboxylic acids, arylpropionic acid derivatives, pyrazoles, pyrazolones, salicylic acid derivatives, thiazinecarboxamides, e-acetamidocaproic acid, S-adenosylmethionine, 3-amino-4-hydroxybutyric acid, amixetrine, bendazac, benzydamine, bucolome, difenpiramide, ditazol, emorfazone, guaiazulene, nabumetone, nimesulide, orgotein, oxaceprol, paranyline, perisoxal, pifoxime, proquazone, proxazole, and tenidap.

[0869] In an additional embodiment, the compositions of the invention are administered alone or in combination with an anti-angiogenic agent. Anti-angiogenic agents that may be administered with the compositions of the invention include, but are not limited to, Angiostatin (Entremed, Rockville, Md.), Troponin-1 (Boston Life Sciences, Boston, Mass.), anti-Invasive Factor, retinoic acid and derivatives thereof, paclitaxel (Taxol), Suramin, Tissue Inhibitor of Metalloproteinase-1, Tissue Inhibitor of Metalloproteinase-2, VEGI, Plasminogen Activator Inhibitor-1, Plasminogen Activator Inhibitor-2, and various forms of the lighter “d group” transition metals.

[0870] Lighter “d group” transition metals include, for example, vanadium, molybdenum, tungsten, titanium, niobium, and tantalum species. Such transition metal species may form transition metal complexes. Suitable complexes of the above-mentioned transition metal species include oxo transition metal complexes.

[0871] Representative examples of vanadium complexes include oxo vanadium complexes such as vanadate and vanadyl complexes. Suitable vanadate complexes include metavanadate and orthovanadate complexes such as, for example, ammonium metavanadate, sodium metavanadate, and sodium orthovanadate. Suitable vanadyl complexes include, for example, vanadyl acetylacetonate and vanadyl sulfate including vanadyl sulfate hydrates such as vanadyl sulfate mono- and trihydrates.

[0872] Representative examples of tungsten and molybdenum complexes also include oxo complexes. Suitable oxo tungsten complexes include tungstate and tungsten oxide complexes. Suitable tungstate complexes include ammonium tungstate, calcium tungstate, sodium tungstate dihydrate, and tungstic acid. Suitable tungsten oxides include tungsten (IV) oxide and tungsten (VI) oxide. Suitable oxo molybdenum complexes include molybdate, molybdenum oxide, and molybdenyl complexes. Suitable molybdate complexes include ammonium molybdate and its hydrates, sodium molybdate and its hydrates, and potassium molybdate and its hydrates. Suitable molybdenum oxides include molybdenum (VI) oxide, molybdenum (VI) oxide, and molybdic acid. Suitable molybdenyl complexes include, for example, molybdenyl acetylacetonate. Other suitable tungsten and molybdenum complexes include hydroxo derivatives derived from, for example, glycerol, tartaric acid, and sugars.

[0873] A wide variety of other anti-angiogenic factors may also be utilized within the context of the present invention. Representative examples include, but are not limited to, platelet factor 4; protamine sulphate; sulphated chitin derivatives (prepared from queen crab shells), (Murata et al., Cancer Res. 51:22-26, (1991)); Sulphated Polysaccharide Peptidoglycan Complex (SP-PG) (the function of this compound may be enhanced by the presence of steroids such as estrogen, and tamoxifen citrate); Staurosporine; modulators of matrix metabolism, including for example, proline analogs, cishydroxyproline, d,L-3,4-dehydroproline, Thiaproline, alpha,alpha-dipyridyl, aminopropionitrile fumarate; 4-propyl-5-(4-pyridinyl)-2(3H)-oxazolone; Methotrexate; Mitoxantrone; Heparin; Interferons; 2 Macroglobulin-serum; ChIMP-3 (Pavloff et al., J. Bio. Chem. 267:17321-17326, (1992)); Chymostatin (Tomkinson et al., Biochem J. 286:475-480, (1992)); Cyclodextrin Tetradecasulfate; Eponemycin; Camptothecin; Fumagillin (Ingber et al., Nature 348:555-557, (1990)); Gold Sodium Thiomalate (“GST”; Matsubara and Ziff, J. Clin. Invest. 79:1440-1446, (1987)); anticollagenase-serum; alpha2-antiplasmin (Holmes et al., J. Biol. Chem. 262(4):1659-1664, (1987)); Bisantrene (National Cancer Institute); Lobenzarit disodium (N-(2)-carboxyphenyl-4-chloroanthronilic acid disodium or “CCA”; (Takeuchi et al., Agents Actions 36:312-316, (1992)); and metalloproteinase inhibitors such as BB94.

[0874] Additional anti-angiogenic factors that may also be utilized within the context of the present invention include Thalidomide, (Celgene, Warren, N.J.); Angiostatic steroid; AGM-1470 (H. Brem and J. Folkman J Pediatr. Surg. 28:445-51 (1993)); an integrin alpha v beta 3 antagonist (C. Storgard et al., J Clin. Invest. 103:47-54 (1999)); carboxynaminolmidazole; Carboxyamidotriazole (CAI) (National Cancer Institute, Bethesda, Md.); Conbretastatin A-4 (CA4P) (OXiGENE, Boston, Mass.); Squalamine (Magainin Pharmaceuticals, Plymouth Meeting, Pa.); TNP-470, (Tap Pharmaceuticals, Deerfield, Ill.); ZD-0101 AstraZeneca (London, UK); APRA (CT2584); Benefin, Byrostatin-1 (SC339555); CGP-41251 (PKC 412); CM101; Dexrazoxane (ICRF187); DMXAA; Endostatin; Flavopridiol; Genestein; GTE; ImmTher; Iressa (ZD1839); Octreotide (Somatostatin); Panretin; Penacillamine; Photopoint; PI-88; Prinomastat (AG-3340) Purlytin; Suradista (FCE26644); Tamoxifen (Nolvadex); Tazarotene; Tetrathiomolybdate; Xeloda (Capecitabine); and 5-Fluorouracil.

[0875] Anti-angiogenic agents that may be administed in combination with the compounds of the invention may work through a variety of mechanisms including, but not limited to, inhibiting proteolysis of the extracellular matrix, blocking the function of endothelial cell-extracellular matrix adhesion molecules, by antagonizing the function of angiogenesis inducers such as growth factors, and inhibiting integrin receptors expressed on proliferating endothelial cells. Examples of anti-angiogenic inhibitors that interfere with extracellular matrix proteolysis and which may be administered in combination with the compositons of the invention include, but are not lmited to, AG-3340 (Agouron, La Jolla, Calif.), BAY-12-9566 (Bayer, West Haven, Conn.), BMS-275291 (Bristol Myers Squibb, Princeton, N.J.), CGS-27032A (Novartis, East Hanover, N.J.), Marimastat (British Biotech, Oxford, UK), and Metastat (Aeterna, St-Foy, Quebec). Examples of anti-angiogenic inhibitors that act by blocking the function of endothelial cell-extracellular matrix adhesion molecules and which may be administered in combination with the compositons of the invention include, but are not lmited to, EMD-121974 (Merck KcgaA Darmstadt, Germany) and Vitaxin (Ixsys, La Jolla, Calif./Medimmune, Gaithersburg, Md.). Examples of anti-angiogenic agents that act by directly antagonizing or inhibiting angiogenesis inducers and which may be administered in combination with the compositons of the invention include, but are not lmited to, Angiozyme (Ribozyme, Boulder, Colo.), Anti-VEGF antibody (Genentech, S. San Francisco, Calif.), PTK-787/ZK-225846 (Novartis, Basel, Switzerland), SU-101 (Sugen, S. San Francisco, Calif.), SU-5416 (Sugen/Pharmacia Upjohn, Bridgewater, N.J.), and SU-6668 (Sugen). Other anti-angiogenic agents act to indirectly inhibit angiogenesis. Examples of indirect inhibitors of angiogenesis which may be administered in combination with the compositons of the invention include, but are not limited to, IM-862 (Cytran, Kirkland, Wash.), Interferon-alpha, IL-12 (Roche, Nutley, N.J.), and Pentosan polysulfate (Georgetown University, Washington, D.C.).

[0876] In particular embodiments, the use of compositions of the invention in combination with anti-angiogenic agents is contemplated for the treatment, prevention, and/or amelioration of an autoimmune disease, such as for example, an autoimmune disease described herein.

[0877] In a particular embodiment, the use of compositions of the invention in combination with anti-angiogenic agents is contemplated for the treatment, prevention, and/or amelioration of arthritis. In a more particular embodiment, the use of compositions of the invention in combination with anti-angiogenic agents is contemplated for the treatment, prevention, and/or amelioration of rheumatoid arthritis.

[0878] In another embodiment, the polynucleotides encoding a polypeptide of the present invention are administered in combination with an angiogenic protein, or polynucleotides encoding an angiogenic protein. Examples of angiogenic proteins that may be administered with the compositions of the invention include, but are not limited to, acidic and basic fibroblast growth factors, VEGF-1, VEGF-2, VEGF-3, epidermal growth factor alpha and beta, platelet-derived endothelial cell growth factor, platelet-derived growth factor, tumor necrosis factor alpha, hepatocyte growth factor, insulin-like growth factor, colony stimulating factor, macrophage colony stimulating factor, granulocyte/macrophage colony stimulating factor, and nitric oxide synthase.

[0879] In additional embodiments, compositions of the invention are administered in combination with a chemotherapeutic agent. Chemotherapeutic agents that may be administered with the Therapeutics of the invention include, but are not limited to alkylating agents such as nitrogen mustards (for example, Mechlorethamine, cyclophosphamide, Cyclophosphamide Ifosfamide, Melphalan (L-sarcolysin), and Chlorambucil), ethylenimines and methylmelamines (for example, Hexamethylmelamine and Thiotepa), alkyl sulfonates (for example, Busulfan), nitrosoureas (for example, Carmustine (BCNU), Lomustine (CCNU), Semustine (methyl-CCNU), and Streptozocin (streptozotocin)), triazenes (for example, Dacarbazine (DTIC; dimethyltriazenoimidazolecarboxamide)), folic acid analogs (for example, Methotrexate (amethopterin)), pyrimidine analogs (for example, Fluorouacil (5-fluorouracil; 5-FU), Floxuridine (fluorodeoxyuridine; FudR), and Cytarabine (cytosine arabinoside)), purine analogs and related inhibitors (for example, Mercaptopurine (6-mercaptopurine; 6-MP), Thioguanine (6-thioguanine; TG), and Pentostatin (2′-deoxycoformycin)), vinca alkaloids (for example, Vinblastine (VLB, vinblastine sulfate)) and Vincristine (vincristine sulfate)), epipodophyllotoxins (for example, Etoposide and Teniposide), antibiotics (for example, Dactinomycin (actinomycin D), Daunorubicin (daunomycin; rubidomycin), Doxorubicin, Bleomycin, Plicamycin (mithramycin), and Mitomycin (mitomycin C), enzymes (for example, L-Asparaginase), biological response modifiers (for example, Interferon-alpha and interferon-alpha-2b), platinum coordination compounds (for example, Cisplatin (cis-DDP) and Carboplatin), anthracenedione (Mitoxantrone), substituted ureas (for example, Hydroxyurea), methylhydrazine derivatives (for example, Procarbazine (N-methylhydrazine; MIH), adrenocorticosteroids (for example, Prednisone), progestins (for example, Hydroxyprogesterone caproate, Medroxyprogesterone, Medroxyprogesterone acetate, and Megestrol acetate), estrogens (for example, Diethylstilbestrol (DES), Diethylstilbestrol diphosphate, Estradiol, and Ethinyl estradiol), antiestrogens (for example, Tamoxifen), androgens (Testosterone proprionate, and Fluoxymesterone), antiandrogens (for example, Flutamide), gonadotropin-releasing horomone analogs (for example, Leuprolide), other hormones and hormone analogs (for example, methyltestosterone, estramustine, estramustine phosphate sodium, chlorotrianisene, and testolactone), and others (for example, dicarbazine, glutamic acid, and mitotane).

[0880] In one embodiment, the compositions of the invention are administered in combination with one or more of the following drugs: infliximab (also known as Remicade™ Centocor, Inc.), Trocade (Roche, RO-32-3555), Leflunomide (also known as Arava™ from Hoechst Marion Roussel), Kineret™ (an IL-1 Receptor antagonist also known as Anakinra from Amgen, Inc.)

[0881] In a specific embodiment, compositions of the invention are administered in combination with CHOP (cyclophosphamide, doxorubicin, vincristine, and prednisone) or combination of one or more of the components of CHOP. In one embodiment, the compositions of the invention are administered in combination with anti-CD20 antibodies, human monoclonal anti-CD20 antibodies. In another embodiment, the compositions of the invention are administered in combination with anti-CD20 antibodies and CHOP, or anti-CD20 antibodies and any combination of one or more of the components of CHOP, particularly cyclophosphamide and/or prednisone. In a specific embodiment, compositions of the invention are administered in combination with Rituximab. In a further embodiment, compositions of the invention are administered with Rituximab and CHOP, or Rituximab and any combination of one or more of the components of CHOP, particularly cyclophosphamide and/or prednisone. In a specific embodiment, compositions of the invention are administered in combination with tositumomab. In a further embodiment, compositions of the invention are administered with tositumomab and CHOP, or tositumomab and any combination of one or more of the components of CHOP, particularly cyclophosphamide and/or prednisone. The anti-CD20 antibodies may optionally be associated with radioisotopes, toxins or cytotoxic prodrugs.

[0882] In another specific embodiment, the compositions of the invention are administered in combination Zevalin™. In a further embodiment, compositions of the invention are administered with Zevalin™ and CHOP, or Zevalin™ and any combination of one or more of the components of CHOP, particularly cyclophosphamide and/or prednisone. Zevalin™ may be associated with one or more radisotopes. Particularly preferred isotopes are ⁹⁰Y and ¹¹¹In.

[0883] In an additional embodiment, the Therapeutics of the invention are administered in combination with cytokines. Cytokines that may be administered with the Therapeutics of the invention include, but are not limited to, IL2, IL3, IL4, IL5, IL6, IL7, IL10, IL12, IL13, IL15, anti-CD40, CD40L, IFN-gamma and TNF-alpha. In another embodiment, Therapeutics of the invention may be administered with any interleukin, including, but not limited to, IL-1alpha, IL-1beta, IL-2, IL-3, IL-4, IL-5, IL-6, IL-7, IL-8, IL-9, IL-10, IL-11, IL-12, IL-13, IL-14, IL-15, IL-16, IL-17, IL-18, IL-19, IL-20, and IL-21.

[0884] In one embodiment, the Therapeutics of the invention are administered in combination with members of the TNF family. TNF, TNF-related or TNF-like molecules that may be administered with the Therapeutics of the invention include, but are not limited to, soluble forms of TNF-alpha, lymphotoxin-alpha (LT-alpha, also known as TNF-beta), LT-beta (found in complex heterotrimer LT-alpha2-beta), OPGL, FasL, CD27L, CD30L, CD40L, 4-1BBL, DcR3, OX40L, TNF-gamma (International Publication No. WO 96/14328), AIM-I (International Publication No. WO 97/33899), endokine-alpha (International Publication No. WO 98/07880), OPG, and neutrokine-alpha (International Publication No. WO 98/18921, OX40, and nerve growth factor (NGF), and soluble forms of Fas, CD30, CD27, CD40 and 4-IBB, TR2 (International Publication No. WO 96/34095), DR3 (International Publication No. WO 97/33904), DR4 (International Publication No. WO 98/32856), TR5 (International Publication No. WO 98/30693), TRANK, TR9 (International Publication No. WO 98/56892), TR10 (International Publication No. WO 98/54202), 312C2 (International Publication No. WO 98/06842), and TR12, and soluble forms CD154, CD70, and CD153.

[0885] In an additional embodiment, the Therapeutics of the invention are administered in combination with angiogenic proteins. Angiogenic proteins that may be administered with the Therapeutics of the invention include, but are not limited to, Glioma Derived Growth Factor (GDGF), as disclosed in European Patent Number EP-399816; Platelet Derived Growth Factor-A (PDGF-A), as disclosed in European Patent Number EP-682110; Platelet Derived Growth Factor-B (PDGF-B), as disclosed in European Patent Number EP-282317; Placental Growth Factor (PIGF), as disclosed in International Publication Number WO 92/06194; Placental Growth Factor-2 (PIGF-2), as disclosed in Hauser et al., Growth Factors, 4:259-268 (1993); Vascular Endothelial Growth Factor (VEGF), as disclosed in International Publication Number WO 90/13649; Vascular Endothelial Growth Factor-A (VEGF-A), as disclosed in European Patent Number EP-506477; Vascular Endothelial Growth Factor-2 (VEGF-2), as disclosed in International Publication Number WO 96/39515; Vascular Endothelial Growth Factor B (VEGF-3); Vascular Endothelial Growth Factor B-186 (VEGF-B186), as disclosed in International Publication Number WO 96/26736; Vascular Endothelial Growth Factor-D (VEGF-D), as disclosed in International Publication Number WO 98/02543; Vascular Endothelial Growth Factor-D (VEGF-D), as disclosed in International Publication Number WO 98/07832; and Vascular Endothelial Growth Factor-E (VEGF-E), as disclosed in German Patent Number DE19639601. The above mentioned references are herein incorporated by reference in their entireties.

[0886] In an additional embodiment, the Therapeutics of the invention are administered in combination with Fibroblast Growth Factors. Fibroblast Growth Factors that may be administered with the Therapeutics of the invention include, but are not limited to, FGF-1, FGF-2, FGF-3, FGF-4, FGF-5, FGF-6, FGF-7, FGF-8, FGF-9, FGF-10, FGF-11, FGF-12, FGF-13, FGF-14, and FGF-15.

[0887] In an additional embodiment, the Therapeutics of the invention are administered in combination with hematopoietic growth factors. Hematopoietic growth factors that may be administered with the Therapeutics of the invention include, but are not limited to, granulocyte macrophage colony stimulating factor (GM-CSF) (sargramostim, LEUKINE™, PROKINE™), granulocyte colony stimulating factor (G-CSF) (filgrastim, NEUPOGEN™), macrophage colony stimulating factor (M-CSF, CSF-1) erythropoietin (epoetin alfa, EPOGEN™, PROCRIT™), stem cell factor (SCF, c-kit ligand, steel factor), megakaryocyte colony stimulating factor, PIXY321 (a GMCSF/IL-3 fusion protein), interleukins, especially any one or more of IL-1 through IL-12, interferon-gamma, or thrombopoietin.

[0888] In certain embodiments, Therapeutics of the present invention are administered in combination with adrenergic blockers, such as, for example, acebutolol, atenolol, betaxolol, bisoprolol, carteolol, labetalol, metoprolol, nadolol, oxprenolol, penbutolol, pindolol, propranolol, sotalol, and timolol.

[0889] In another embodiment, the Therapeutics of the invention are administered in combination with an antiarrhythmic drug (e.g., adenosine, amidoarone, bretylium, digitalis, digoxin, digitoxin, diliazem, disopyramide, esmolol, flecainide, lidocaine, mexiletine, moricizine, phenyloin, procainamide, N-acetyl procainamide, propafenone, propranolol, quinidine, sotalol, tocainide, and verapamil).

[0890] In another embodiment, the Therapeutics of the invention are administered in combination with diuretic agents, such as carbonic anhydrase-inhibiting agents (e.g., acetazolamide, dichlorphenamide, and methazolamide), osmotic diuretics (e.g., glycerin, isosorbide, mannitol, and urea), diuretics that inhibit Na⁺—K⁺-2Cl⁻ symport (e.g., furosemide, bumetanide, azosemide, piretanide, tripamide, ethacrynic acid, muzolimine, and torsemide), thiazide and thiazide-like diuretics (e.g., bendroflumethiazide, benzthiazide, chlorothiazide, hydrochlorothiazide, hydroflumethiazide, methyclothiazide, polythiazide, trichormethiazide, chlorthalidone, indapamide, metolazone, and quinethazone), potassium sparing diuretics (e.g., amiloride and triamterene), and mineralcorticoid receptor antagonists (e.g., spironolactone, canrenone, and potassium canrenoate).

[0891] In one embodiment, the Therapeutics of the invention are administered in combination with treatments for endocrine and/or hormone imbalance disorders. Treatments for endocrine and/or hormone imbalance disorders include, but are not limited to, ¹²⁷I, radioactive isotopes of iodine such as ¹³¹I and ¹²³I; recombinant growth hormone, such as HUMATROPE™ (recombinant somatropin); growth hormone analogs such as PROTROPIN™ (somatrem); dopamine agonists such as PARLODEL™ (bromocriptine); somatostatin analogs such as SANDOSTATIN™ (octreotide); gonadotropin preparations such as PREGNYL™, A.P.L.™ and PROFASI™ (chorionic gonadotropin (CG)), PERGONAL™ (menotropins), and METRODIN™ (urofollitropin (uFSH)); synthetic human gonadotropin releasing hormone preparations such as FACTREL™ and LUTREPULSE™ (gonadorelin hydrochloride); synthetic gonadotropin agonists such as LUPRON™ (leuprolide acetate), SUPPRELIN™ (histrelin acetate), SYNAREL™ (nafarelin acetate), and ZOLADEX™ (goserelin acetate); synthetic preparations of thyrotropin-releasing hormone such as RELEFACT TRH™ and THYPINONE™ (protirelin); recombinant human TSH such as THYROGEN™; synthetic preparations of the sodium salts of the natural isomers of thyroid hormones such as L-T₄™, SYNTHROID™ and LEVOTHROID™ (levothyroxine sodium), L-T₃™, CYTOMEL™ and TRIOSTAT™ (liothyroine sodium), and THYROLAR™ (liotrix); antithyroid compounds such as 6-n-propylthiouracil (propylthiouracil), 1-methyl-2-mercaptoimidazole and TAPAZOLE™ (methimazole), NEO-MERCAZOLE™ (carbimazole); beta-adrenergic receptor antagonists such as propranolol and esmolol; Ca²⁺ channel blockers; dexamethasone and iodinated radiological contrast agents such as TELEPAQUE™ (iopanoic acid) and ORAGRAFIN™ (sodium ipodate).

[0892] Additional treatments for endocrine and/or hormone imbalance disorders include, but are not limited to, estrogens or congugated estrogens such as ESTRACE™ (estradiol), ESTINYL™ (ethinyl estradiol), PREMARIN™, ESTRATAB™, ORTHO-EST™, OGEN™ and estropipate (estrone), ESTROVIS™ (quinestrol), ESTRADERM™ (estradiol), DELESTROGEN™ and VALERGEN™ (estradiol valerate), DEPO-ESTRADIOL CYPIONATE™ and ESTROJECT LA™ (estradiol cypionate); antiestrogens such as NOLVADEX™ (tamoxifen), SEROPHENE™ and CLOMID™ (clomiphene); progestins such as DURALUTIN™ (hydroxyprogesterone caproate), MPA™ and DEPO-PROVERA™ (medroxyprogesterone acetate), PROVERA™ and CYCRIN™ (MPA), MEGACE™ (megestrol acetate), NORLUTIN™ (norethindrone), and NORLUTATE™ and AYGESTIN™ (norethindrone acetate); progesterone implants such as NORPLANT SYSTEM™ (subdermal implants of norgestrel); antiprogestins such as RU 486™ (mifepristone); hormonal contraceptives such as ENOVID™ (norethynodrel plus mestranol), PROGESTASERT™ (intrauterine device that releases progesterone), LOESTRIN™, BREVICON™, MODICON™, GENORA™, NELONA™, NORINYL™, OVACON-35™ and OVACON-50™ (ethinyl estradiol/norethindrone), LEVLEN™, NORDETTE™, TRI-LEVLEN™ and TRIPHASIL-21™ (ethinyl estradiol/levonorgestrel) LO/OVRAL™ and OVRAL™ (ethinyl estradiol/norgestrel), DEMULEN™ (ethinyl estradiol/ethynodiol diacetate), NORINYL™, ORTHO-NOVUM™, NORETHIN™, GENORA™, and NELOVA™ (norethindrone/mestranol), DESOGEN™ and ORTHO-CEPT™ (ethinyl estradiol/desogestrel), ORTHO-CYCLEN™ and ORTHO-TRICYCLEN™ (ethinyl estradiol/norgestimate), MICRONOR™ and NOR-QD™ (norethindrone), and OVRETTE™ (norgestrel).

[0893] Additional treatments for endocrine and/or hormone imbalance disorders include, but are not limited to, testosterone esters such as methenolone acetate and testosterone undecanoate; parenteral and oral androgens such as TESTOJECT-50™ (testosterone), TESTEX™ (testosterone propionate), DELATESTRYL™ (testosterone enanthate), DEPO-TESTOSTERONE™ (testosterone cypionate), DANOCRINE™ (danazol), HALOTESTIN™ (fluoxymesterone), ORETON METHYL™, TESTRED™ and VIRLON™ (methyltestosterone), and OXANDRIN™ (oxandrolone); testosterone transdermal systems such as TESTODERM™; androgen receptor antagonist and 5-alpha-reductase inhibitors such as ANDROCUR™ (cyproterone acetate), EULEXIN™ (flutamide), and PROSCAR™ (finasteride); adrenocorticotropic hormone preparations such as CORTROSYN™ (cosyntropin); adrenocortical steroids and their synthetic analogs such as ACLOVATE™ (alclometasone dipropionate), CYCLOCORT™ (amcinonide), BECLOVENT™ and VANCERL™ (beclomethasone dipropionate), CELESTONE™ (betamethasone), BENISONE™ and UTICORT™ (betamethasone benzoate), DIPROSONE™ (betamethasone dipropionate), CELESTONE PHOSPHATE™ (betamethasone sodium phosphate), CELESTONE SOLUSPAN™ (betamethasone sodium phosphate and acetate), BETA-VAL™ and VALISONE™ (betamethasone valerate), TEMOVATE™ (clobetasol propionate), CLODERM™ (clocortolone pivalate), CORTEF™ and HYDROCORTONE™ (cortisol (hydrocortisone)), HYDROCORTONE ACETATE™ (cortisol (hydrocortisone) acetate), LOCOID™ (cortisol (hydrocortisone) butyrate), HYDROCORTONE PHOSPHATE™ (cortisol (hydrocortisone) sodium phosphate), A-HYDROCORT™ and SOLU CORTEF™ (cortisol (hydrocortisone) sodium succinate), WESTCORT™ (cortisol (hydrocortisone) valerate), CORTISONE ACETATE™ (cortisone acetate), DESOWEN™ and TRIDESILON™ (desonide), TOPICORT™ (desoximetasone), DECADRON™ (dexamethasone), DECADRON LA™ (dexamethasone acetate), DECADRON PHOSPHATE™ and HEXADROL PHOSPHATE™ (dexamethasone sodium phosphate), FLORONE™ and MAXIFLOR™ (diflorasone diacetate), FLORINEF ACETATE™ (fludrocortisone acetate), AEROBID™ and NASALIDE™ (flunisolide), FLUONID™ and SYNALAR™ (fluocinolone acetonide), LIDEX™ (fluocinonide), FLUOR-OP™ and FML™ (fluorometholone), CORDRAN™ (flurandrenolide), HALOG™ (halcinonide), HMS LIZUIFILM™ (medrysone), MEDROL™ (methylprednisolone), DEPO-MEDROL™ and MEDROL ACETATE™ (methylprednisone acetate), A-METHAPRED™ and SOLUMEDROL™ (methylprednisolone sodium succinate), ELOCON™ (mometasone furoate), HALDRONE™ (paramethasone acetate), DELTA-CORTEF™ (prednisolone), ECONOPRED™ (prednisolone acetate), HYDELTRASOL™ (prednisolone sodium phosphate), HYDELTRA-T.B.A™ (prednisolone tebutate), DELTASONE™ (prednisone), ARISTOCORT™ and KENACORT™ (triamcinolone), KENALOG™ (triamcinolone acetonide), ARISTOCORT™ and KENACORT DIACETATE™ (triamcinolone diacetate), and ARISTOSPAN™ (triamcinolone hexacetonide); inhibitors of biosynthesis and action of adrenocortical steroids such as CYTADREN™ (aminoglutethimide), NIZORAL™ (ketoconazole), MODRASTANE™ (trilostane), and METOPIRONE™ (metyrapone); bovine, porcine or human insulin or mixtures thereof; insulin analogs; recombinant human insulin such as HUMULIN™ and NOVOLIN™; oral hypoglycemic agents such as ORAMIDE™ and ORINASE™ (tolbutamide), DIABINESE™ (chlorpropamide), TOLAMIDE™ and TOLINASE™ (tolazamide), DYMELOR™ (acetohexamide), glibenclamide, MICRONASE™, DIBETA™ and GLYNASE™ (glyburide), GLUCOTROL™ (glipizide), and DIAMICRON™ (gliclazide), GLUCOPHAGE™ (metformin), ciglitazone, pioglitazone, and alpha-glucosidase inhibitors; bovine or porcine glucagon; somatostatins such as SANDOSTATIN™ (octreotide); and diazoxides such as PROGLYCEM™ (diazoxide).

[0894] In an additional embodiment, the Therapeutics of the invention are administered in combination with drugs effective in treating iron deficiency and hypochromic anemias, including but not limited to, ferrous sulfate (iron sulfate, FEOSOL™), ferrous fumarate (e.g., FEOSTAT™), ferrous gluconate (e.g., FERGON™), polysaccharide-iron complex (e.g., NIFEREX™), iron dextran injection (e.g., INFED™), cupric sulfate, pyroxidine, riboflavin, Vitamin B₁₂, cyancobalamin injection (e.g., REDISOL™, RUBRAMIN PC™), hydroxocobalamin, folic acid (e.g., FOLVITE™), leucovorin (folinic acid, 5-CHOH4PteGlu, citrovorum factor) or WELLCOVORIN (Calcium salt of leucovorin), transferrin or ferritin.

[0895] In another embodiment, Therapeutics of the invention are administered in combination with vasodilating agents and/or calcium channel blocking agents. Vasodilating agents that may be administered with the Therapeutics of the invention include, but are not limited to, Angiotensin Converting Enzyme (ACE) inhibitors (e.g., papaverine, isoxsuprine, benazepril, captopril, cilazapril, enalapril, enalaprilat, fosinopril, lisinopril, moexipril, perindopril, quinapril, ramipril, spirapril, trandolapril, and nylidrin), and nitrates (e.g., isosorbide dinitrate, isosorbide mononitrate, and nitroglycerin). Examples of calcium channel blocking agents that may be administered in combination with the Therapeutics of the invention include, but are not limited to amlodipine, bepridil, diltiazem, felodipine, flunarizine, isradipine, nicardipine, nifedipine, nimodipine, and verapamil.

[0896] In certain embodiments, the Therapeutics of the invention are administered in combination with treatments for gastrointestinal disorders. Treatments for gastrointestinal disorders that may be administered with the Therapeutic of the invention include, but are not limited to, H₂ histamine receptor antagonists (e.g., TAGAMET™ (cimetidine), ZANTAC™ (ranitidine), PEPCID™ (famotidine), and AXID™ (nizatidine)); inhibitors of H⁺, K⁺ ATPase (e.g., PREVACID™ (lansoprazole) and PRILOSEC™ (omeprazole)); Bismuth compounds (e.g., PEPTO-BISMOL™ (bismuth subsalicylate) and DE-NOL™ (bismuth subcitrate)); various antacids; sucralfate; prostaglandin analogs (e.g. CYTOTEC™ (misoprostol)); muscarinic cholinergic antagonists; laxatives (e.g., surfactant laxatives, stimulant laxatives, saline and osmotic laxatives); antidiarrheal agents (e.g., LOMOTIL™ (diphenoxylate), MOTOFEN™ (diphenoxin), and IMODIUM™ (loperamide hydrochloride)), synthetic analogs of somatostatin such as SANDOSTATIN™ (octreotide), antiemetic agents (e.g., ZOFRAN™ (ondansetron), KYTRIL™ (granisetron hydrochloride), tropisetron, dolasetron, metoclopramide, chlorpromazine, perphenazine, prochlorperazine, promethazine, thiethylperazine, triflupromazine, domperidone, haloperidol, droperidol, trimethobenzamide, dexamethasone, methylprednisolone, dronabinol, and nabilone); D2 antagonists (e.g., metoclopramide, trimethobenzamide and chlorpromazine); bile salts; chenodeoxycholic acid; ursodeoxycholic acid; and pancreatic enzyme preparations such as pancreatin and pancrelipase.

[0897] In additional embodiments, the Therapeutics of the invention are administered in combination with other therapeutic or prophylactic regimens, such as, for example, radiation therapy.

### Example 14

### Method of Treating Decreased Levels of the Polypeptide

[0898] The present invention relates to a method for treating an individual in need of an increased level of a polypeptide of the invention in the body comprising administering to such an individual a composition comprising a therapeutically effective amount of polypeptides (including agonists thereto), and/or antibodies of the invention. Moreover, it will be appreciated that conditions caused by a decrease in the standard or normal expression level of a polypeptide of the present invention in an individual may be treated by administering agonists of said polypeptide. Thus, the invention also provides a method of treatment of an individual in need of an increased level of the polypeptide comprising administering to such an individual a Therapeutic comprising an amount of the agonist (including polypeptides and antibodies of the present invention) to increase the activity level of the polypeptide in such an individual.

[0899] For example, a patient with decreased levels of a polypeptide receives a daily dose 0.1-100 ug/kg of the agonist for six consecutive days. The exact details of the dosing scheme, based on administration and formulation, are provided in Example 13.

### Example 15

### Method of Treating Increased Levels of the Polypeptide

[0900] The present invention also relates to a method of treating an individual in need of a decreased level of a polypeptide of the invention in the body comprising administering to such an individual a composition comprising a therapeutically effective amount of an antagonist of the invention (including polypeptides and antibodies of the invention).

[0901] In one example, antisense technology is used to inhibit production of a polypeptide of the present invention. This technology is one example of a method of decreasing levels of a polypeptide, due to a variety of etiologies, such as cancer.

[0902] For example, a patient diagnosed with abnormally increased levels of a polypeptide is administered intravenously antisense polynucleotides at 0.5, 1.0, 1.5, 2.0 and 3.0 mg/kg day for 21 days. This treatment is repeated after a 7-day rest period if the treatment was well tolerated. The antisense polynucleotides of the present invention can be formulated using techniques and formulations described herein (e.g. see Example 13), or otherwise known in the art.

### Example 16

### Method of Treatment Using Gene Therapy-Ex Vivo

[0903] One method of gene therapy transplants fibroblasts, which are capable of expressing a polypeptide, onto a patient. Generally, fibroblasts are obtained from a subject by skin biopsy. The resulting tissue is placed in tissue-culture medium and separated into small pieces. Small chunks of the tissue are placed on a wet surface of a tissue culture flask, approximately ten pieces are placed in each flask. The flask is turned upside down, closed tight and left at room temperature over night. After 24 hours at room temperature, the flask is inverted and the chunks of tissue remain fixed to the bottom of the flask and fresh media (e.g., Ham's F12 media, with 10% FBS, penicillin and streptomycin) is added. The flasks are then incubated at 37 degree C. for approximately one week.

[0904] At this time, fresh media is added and subsequently changed every several days. After an additional two weeks in culture, a monolayer of fibroblasts emerge. The monolayer is trypsinized and scaled into larger flasks.

[0905] pMV-7 (Kirschmeier, P. T. et al., DNA, 7:219-25 (1988)), flanked by the long terminal repeats of the Moloney murine sarcoma virus, is digested with EcoRI and HindIII and subsequently treated with calf intestinal phosphatase. The linear vector is fractionated on agarose gel and purified, using glass beads.

[0906] The cDNA encoding a polypeptide of the present invention can be amplified using PCR primers which correspond to the 5′ and 3′ end sequences respectively as set forth in Example 1 using primers and having appropriate restriction sites and initiation/stop codons, if necessary. Preferably, the 5′ primer contains an EcoRI site and the 3′ primer includes a HindIII site. Equal quantities of the Moloney murine sarcoma virus linear backbone and the amplified EcoRI and HindIII fragment are added together, in the presence of T4 DNA ligase. The resulting mixture is maintained under conditions appropriate for ligation of the two fragments. The ligation mixture is then used to transform bacteria HB101, which are then plated onto agar containing kanamycin for the purpose of confirming that the vector has the gene of interest properly inserted.

[0907] The amphotropic pA317 or GP+am12 packaging cells are grown in tissue culture to confluent density in Dulbecco's Modified Eagles Medium (DMEM) with 10% calf serum (CS), penicillin and streptomycin. The MSV vector containing the gene is then added to the media and the packaging cells transduced with the vector. The packaging cells now produce infectious viral particles containing the gene (the packaging cells are now referred to as producer cells).

[0908] Fresh media is added to the transduced producer cells, and subsequently, the media is harvested from a 10 cm plate of confluent producer cells. The spent media, containing the infectious viral particles, is filtered through a millipore filter to remove detached producer cells and this media is then used to infect fibroblast cells. Media is removed from a sub-confluent plate of fibroblasts and quickly replaced with the media from the producer cells. This media is removed and replaced with fresh media. If the titer of virus is high, then virtually all fibroblasts will be infected and no selection is required. If the titer is very low, then it is necessary to use a retroviral vector that has a selectable marker, such as neo or his. Once the fibroblasts have been efficiently infected, the fibroblasts are analyzed to determine whether protein is produced.

[0909] The engineered fibroblasts are then transplanted onto the host, either alone or after having been grown to confluence on cytodex 3 microcarrier beads.

### Example 17

### Gene Therapy Using Endogenous Genes Corresponding to Polynucleotides of the Invention

[0910] Another method of gene therapy according to the present invention involves operably associating the endogenous polynucleotide sequence of the invention with a promoter via homologous recombination as described, for example, in U.S. Pat. No. 5,641,670, issued Jun. 24, 1997; International Publication NO: WO 96/29411, published Sep. 26, 1996; International Publication NO: WO 94/12650, published Aug. 4, 1994; Koller et al., Proc. Natl. Acad. Sci. USA, 86:8932-8935 (1989); and Zijlstra et al., Nature, 342:435-438 (1989). This method involves the activation of a gene which is present in the target cells, but which is not expressed in the cells, or is expressed at a lower level than desired.

[0911] Polynucleotide constructs are made which contain a promoter and targeting sequences, which are homologous to the 5′ non-coding sequence of endogenous polynucleotide sequence, flanking the promoter. The targeting sequence will be sufficiently near the 5′ end of the polynucleotide sequence so the promoter will be operably linked to the endogenous sequence upon homologous recombination. The promoter and the targeting sequences can be amplified using PCR. Preferably, the amplified promoter contains distinct restriction enzyme sites on the 5′ and 3′ ends. Preferably, the 3′ end of the first targeting sequence contains the same restriction enzyme site as the 5′ end of the amplified promoter and the 5′ end of the second targeting sequence contains the same restriction site as the 3′ end of the amplified promoter.

[0912] The amplified promoter and the amplified targeting sequences are digested with the appropriate restriction enzymes and subsequently treated with calf intestinal phosphatase. The digested promoter and digested targeting sequences are added together in the presence of T4 DNA ligase. The resulting mixture is maintained under conditions appropriate for ligation of the two fragments. The construct is size fractionated on an agarose gel, then purified by phenol extraction and ethanol precipitation.

[0913] In this Example, the polynucleotide constructs are administered as naked polynucleotides via electroporation. However, the polynucleotide constructs may also be administered with transfection-facilitating agents, such as liposomes, viral sequences, viral particles, precipitating agents, etc. Such methods of delivery are known in the art.

[0914] Once the cells are transfected, homologous recombination will take place which results in the promoter being operably linked to the endogenous polynucleotide sequence. This results in the expression of polynucleotide corresponding to the polynucleotide in the cell. Expression may be detected by immunological staining, or any other method known in the art.

[0915] Fibroblasts are obtained from a subject by skin biopsy. The resulting tissue is placed in DMEM+10% fetal calf serum. Exponentially growing or early stationary phase fibroblasts are trypsinized and rinsed from the plastic surface with nutrient medium. An aliquot of the cell suspension is removed for counting, and the remaining cells are subjected to centrifugation. The supernatant is aspirated and the pellet is resuspended in 5 ml of electroporation buffer (20 mM HEPES pH 7.3, 137 mM NaCl, 5 mM KCl, 0.7 mM Na₂HPO₄, 6 mM dextrose). The cells are recentrifuged, the supernatant aspirated, and the cells resuspended in electroporation buffer containing 1 mg/ml acetylated bovine serum albumin. The final cell suspension contains approximately 3×10⁶ cells/ml. Electroporation should be performed immediately following resuspension.

[0916] Plasmid DNA is prepared according to standard techniques. For example, to construct a plasmid for targeting to the locus corresponding to the polynucleotide of the invention, plasmid pUC18 (MBI Fermentas, Amherst, N.Y.) is digested with HindIII. The CMV promoter is amplified by PCR with an XbaI site on the 5′ end and a BamHI site on the 3′ end. Two non-coding sequences are amplified via PCR: one non-coding sequence (fragment 1) is amplified with a HindIII site at the 5′ end and an Xba site at the 3′end; the other non-coding sequence (fragment 2) is amplified with a BamHI site at the 5′end and a HindIII site at the 3′end. The CMV promoter and the fragments (1 and 2) are digested with the appropriate enzymes (CMV promoter—XbaI and BamHI; fragment 1—XbaI; fragment 2—BamHI) and ligated together. The resulting ligation product is digested with HindIII, and ligated with the HindIII-digested pUC18 plasmid.

[0917] Plasmid DNA is added to a sterile cuvette with a 0.4 cm electrode gap (Bio-Rad). The final DNA concentration is generally at least 120 μg/ml. 0.5 ml of the cell suspension (containing approximately 1.5×10⁶ cells) is then added to the cuvette, and the cell suspension and DNA solutions are gently mixed. Electroporation is performed with a Gene-Pulser apparatus (Bio-Rad). Capacitance and voltage are set at 960 μF and 250-300 V, respectively. As voltage increases, cell survival decreases, but the percentage of surviving cells that stably incorporate the introduced DNA into their genome increases dramatically. Given these parameters, a pulse time of approximately 14-20 mSec should be observed.

[0918] Electroporated cells are maintained at room temperature for approximately 5 min, and the contents of the cuvette are then gently removed with a sterile transfer pipette. The cells are added directly to 10 ml of prewarmed nutrient media (DMEM with 15% calf serum) in a 10 cm dish and incubated at 37 degree C. The following day, the media is aspirated and replaced with 10 ml of fresh media and incubated for a further 16-24 hours.

[0919] The engineered fibroblasts are then injected into the host, either alone or after having been grown to confluence on cytodex 3 microcarrier beads. The fibroblasts now produce the protein product. The fibroblasts can then be introduced into a patient as described above.

### Example 18

### Method of Treatment Using Gene Therapy—In Vivo

[0920] Another aspect of the present invention is using in vivo gene therapy methods to prevent, treat, and/or ameliorate diabetes mellitus. The gene therapy method relates to the introduction of naked nucleic acid (DNA, RNA, and antisense DNA or RNA) sequences into an animal to increase or decrease the expression of the polypeptide. The polynucleotide of the present invention may be operatively linked to (i.e., associated with) a promoter or any other genetic elements necessary for the expression of the polypeptide by the target tissue. Such gene therapy and delivery techniques and methods are known in the art, see, for example, WO90/11092, WO98/11779; U.S. Pat. Nos. 5,693,622, 5,705,151, 5,580,859; Tabata et al., Cardiovasc. Res. 35(3):470-479 (1997); Chao et al., Pharmacol. Res. 35(6):517-522 (1997); Wolff, Neuromuscul. Disord. 7(5):314-318 (1997); Schwartz et al., Gene Ther. 3(5):405-411 (1996); Tsurumi et al., Circulation 94(12):3281-3290 (1996) (incorporated herein by reference).

[0921] The polynucleotide constructs may be delivered by any method that delivers injectable materials to the cells of an animal, such as, injection into the interstitial space of tissues (heart, muscle, skin, lung, liver, intestine and the like). The polynucleotide constructs can be delivered in a pharmaceutically acceptable liquid or aqueous carrier.

[0922] The term “naked” polynucleotide, DNA or RNA, refers to sequences that are free from any delivery vehicle that acts to assist, promote, or facilitate entry into the cell, including viral sequences, viral particles, liposome formulations, lipofectin or precipitating agents and the like. However, the polynucleotides of the present invention may also be delivered in liposome formulations (such as those taught in Felgner P. L. et al. (1995) Ann. NY Acad. Sci. 772:126-139 and Abdallah B. et al. (1995) Biol. Cell 85(1):1-7) which can be prepared by methods well known to those skilled in the art.

[0923] The polynucleotide vector constructs used in the gene therapy method are preferably constructs that will not integrate into the host genome nor will they contain sequences that allow for replication. Any strong promoter known to those skilled in the art can be used for driving the expression of DNA. Unlike other gene therapy techniques, one major advantage of introducing naked nucleic acid sequences into target cells is the transitory nature of the polynucleotide synthesis in the cells. Studies have shown that non-replicating DNA sequences can be introduced into cells to provide production of the desired polypeptide for periods of up to six months.

[0924] The polynucleotide construct can be delivered to the interstitial space of tissues within an animal, including muscle, skin, brain, lung, liver, spleen, bone marrow, thymus, heart, lymph, blood, bone, cartilage, pancreas, kidney, gall bladder, stomach, intestine, testis, ovary, uterus, rectum, nervous system, eye, gland, and connective tissue. Interstitial space of the tissues comprises the intercellular fluid, mucopolysaccharide matrix among the reticular fibers of organ tissues, elastic fibers in the walls of vessels or chambers, collagen fibers of fibrous tissues, or that same matrix within connective tissue ensheathing muscle cells or in the lacunae of bone. It is similarly the space occupied by the plasma of the circulation and the lymph fluid of the lymphatic channels. Delivery to the interstitial space of muscle tissue is preferred for the reasons discussed below. They may be conveniently delivered by injection into the tissues comprising these cells. They are preferably delivered to and expressed in persistent, non-dividing cells which are differentiated, although delivery and expression may be achieved in non-differentiated or less completely differentiated cells, such as, for example, stem cells of blood or skin fibroblasts. In vivo muscle cells are particularly competent in their ability to take up and express polynucleotides.

[0925] For the naked polynucleotide injection, an effective dosage amount of DNA or RNA will be in the range of from about 0.05 g/kg body weight to about 50 mg/kg body weight. Preferably the dosage will be from about 0.005 mg/kg to about 20 mg/kg and more preferably from about 0.05 mg/kg to about 5 mg/kg. Of course, as the artisan of ordinary skill will appreciate, this dosage will vary according to the tissue site of injection. The appropriate and effective dosage of nucleic acid sequence can readily be determined by those of ordinary skill in the art and may depend on the condition being treated and the route of administration. The preferred route of administration is by the parenteral route of injection into the interstitial space of tissues. However, other parenteral routes may also be used, such as, inhalation of an aerosol formulation particularly for delivery to lungs or bronchial tissues, throat or mucous membranes of the nose. In addition, naked polynucleotide constructs can be delivered to arteries during angioplasty by the catheter used in the procedure.

[0926] The dose response effects of injected polynucleotide in muscle in vivo is determined as follows. Suitable template DNA for production of mRNA coding for polypeptide of the present invention is prepared in accordance with a standard recombinant DNA methodology. The template DNA, which may be either circular or linear, is either used as naked DNA or complexed with liposomes. The quadriceps muscles of mice are then injected with various amounts of the template DNA.

[0927] Five to six week old female and male Balb/C mice are anesthetized by intraperitoneal injection with 0.3 ml of 2.5% Avertin. A 1.5 cm incision is made on the anterior thigh, and the quadriceps muscle is directly visualized. The template DNA is injected in 0.1 ml of carrier in a 1 cc syringe through a 27 gauge needle over one minute, approximately 0.5 cm from the distal insertion site of the muscle into the knee and about 0.2 cm deep. A suture is placed over the injection site for future localization, and the skin is closed with stainless steel clips.

[0928] After an appropriate incubation time (e.g., 7 days) muscle extracts are prepared by excising the entire quadriceps. Every fifth 15 um cross-section of the individual quadriceps muscles is histochemically stained for protein expression. A time course for protein expression may be done in a similar fashion except that quadriceps from different mice are harvested at different times. Persistence of DNA in muscle following injection may be determined by Southern blot analysis after preparing total cellular DNA and HIRT supernatants from injected and control mice. The results of the above experimentation in mice can be used to extrapolate proper dosages and other treatment parameters in humans and other animals using naked DNA.

### Example 19

### Transgenic Animals

[0929] The polypeptides of the invention can also be expressed in transgenic animals. Animals of any species, including, but not limited to, mice, rats, rabbits, hamsters, guinea pigs, pigs, micro-pigs, goats, sheep, cows and non-human primates, e.g., baboons, monkeys, and chimpanzees may be used to generate transgenic animals. In a specific embodiment, techniques described herein or otherwise known in the art, are used to express polypeptides of the invention in humans, as part of a gene therapy protocol.

[0930] Any technique known in the art may be used to introduce the transgene (i.e., polynucleotides of the invention) into animals to produce the founder lines of transgenic animals. Such techniques include, but are not limited to, pronuclear microinjection (Paterson et al., Appl. Microbiol. Biotechnol. 40:691-698 (1994); Carver et al., Biotechnology (NY) 11:1263-1270 (1993); Wright et al., Biotechnology (NY) 9:830-834 (1991); and Hoppe et al., U.S. Pat. No. 4,873,191 (1989)); retrovirus mediated gene transfer into germ lines (Van der Putten et al., Proc. Natl. Acad. Sci., USA 82:6148-6152 (1985)), blastocysts or embryos; gene targeting in embryonic stem cells (Thompson et al., Cell 56:313-321 (1989)); electroporation of cells or embryos (Lo, 1983, Mol Cell. Biol. 3:1803-1814 (1983)); introduction of the polynucleotides of the invention using a gene gun (see, e.g., Ulmer et al., Science 259:1745 (1993); introducing nucleic acid constructs into embryonic pleuripotent stem cells and transferring the stem cells back into the blastocyst; and sperm-mediated gene transfer (Lavitrano et al., Cell 57:717-723 (1989); etc. For a review of such techniques, see Gordon, “Transgenic Animals,” Intl. Rev. Cytol. 115:171-229 (1989), which is incorporated by reference herein in its entirety.

[0931] Any technique known in the art may be used to produce transgenic clones containing polynucleotides of the invention, for example, nuclear transfer into enucleated oocytes of nuclei from cultured embryonic, fetal, or adult cells induced to quiescence (Campell et al., Nature 380:64-66 (1996); Wilmut et al., Nature 385:810-813 (1997)).

[0932] The present invention provides for transgenic animals that carry the transgene in all their cells, as well as animals which carry the transgene in some, but not all their cells, i.e., mosaic animals or chimeric. The transgene may be integrated as a single transgene or as multiple copies such as in concatamers, e.g., head-to-head tandems or head-to-tail tandems. The transgene may also be selectively introduced into and activated in a particular cell type by following, for example, the teaching of Lasko et al. (Lasko et al., Proc. Natl. Acad. Sci. USA 89:6232-6236 (1992)). The regulatory sequences required for such a cell-type specific activation will depend upon the particular cell type of interest, and will be apparent to those of skill in the art. When it is desired that the polynucleotide transgene be integrated into the chromosomal site of the endogenous gene, gene targeting is preferred. Briefly, when such a technique is to be utilized, vectors containing some nucleotide sequences homologous to the endogenous gene are designed for the purpose of integrating, via homologous recombination with chromosomal sequences, into and disrupting the function of the nucleotide sequence of the endogenous gene. The transgene may also be selectively introduced into a particular cell type, thus inactivating the endogenous gene in only that cell type, by following, for example, the teaching of Gu et al. (Gu et al., Science 265:103-106 (1994)). The regulatory sequences required for such a cell-type specific inactivation will depend upon the particular cell type of interest, and will be apparent to those of skill in the art.

[0933] Once transgenic animals have been generated, the expression of the recombinant gene may be assayed utilizing standard techniques. Initial screening may be accomplished by Southern blot analysis or PCR techniques to analyze animal tissues to verify that integration of the transgene has taken place. The level of mRNA expression of the transgene in the tissues of the transgenic animals may also be assessed using techniques which include, but are not limited to, Northern blot analysis of tissue samples obtained from the animal, in situ hybridization analysis, and reverse transcriptase-PCR (rt-PCR). Samples of transgenic gene-expressing tissue may also be evaluated immunocytochemically or immunohistochemically using antibodies specific for the transgene product.

[0934] Once the founder animals are produced, they may be bred, inbred, outbred, or crossbred to produce colonies of the particular animal. Examples of such breeding strategies include, but are not limited to: outbreeding of founder animals with more than one integration site in order to establish separate lines; inbreeding of separate lines in order to produce compound transgenics that express the transgene at higher levels because of the effects of additive expression of each transgene; crossing of heterozygous transgenic animals to produce animals homozygous for a given integration site in order to both augment expression and eliminate the need for screening of animals by DNA analysis; crossing of separate homozygous lines to produce compound heterozygous or homozygous lines; and breeding to place the transgene on a distinct background that is appropriate for an experimental model of interest.

[0935] Transgenic animals of the invention have uses which include, but are not limited to, animal model systems useful in elaborating the biological function of polypeptides of the present invention, studying conditions and/or disorders associated with aberrant expression, and in screening for compounds effective in ameliorating such conditions and/or disorders.

### Example 20

### Knock-Out Animals

[0936] Endogenous gene expression can also be reduced by inactivating or “knocking out” the gene and/or its promoter using targeted homologous recombination. (e.g., see Smithies et al., Nature 317:230-234 (1985); Thomas & Capecchi, Cell 51:503-512 (1987); Thompson et al., Cell 5:313-321 (1989); each of which is incorporated by reference herein in its entirety). For example, a mutant, non-functional polynucleotide of the invention (or a completely unrelated DNA sequence) flanked by DNA homologous to the endogenous polynucleotide sequence (either the coding regions or regulatory regions of the gene) can be used, with or without a selectable marker and/or a negative selectable marker, to transfect cells that express polypeptides of the invention in vivo. In another embodiment, techniques known in the art are used to generate knockouts in cells that contain, but do not express the gene of interest. Insertion of the DNA construct, via targeted homologous recombination, results in inactivation of the targeted gene. Such approaches are particularly suited in research and agricultural fields where modifications to embryonic stem cells can be used to generate animal offspring with an inactive targeted gene (e.g., see Thomas & Capecchi 1987 and Thompson 1989, supra). However this approach can be routinely adapted for use in humans provided the recombinant DNA constructs are directly administered or targeted to the required site in vivo using appropriate viral vectors that will be apparent to those of skill in the art.

[0937] In further embodiments of the invention, cells that are genetically engineered to express the polypeptides of the invention, or alternatively, that are genetically engineered not to express the polypeptides of the invention (e.g., knockouts) are administered to a patient in vivo. Such cells may be obtained from the patient (i.e., animal, including human) or an MHC compatible donor and can include, but are not limited to fibroblasts, bone marrow cells, blood cells (e.g., lymphocytes), adipocytes, muscle cells, endothelial cells etc. The cells are genetically engineered in vitro using recombinant DNA techniques to introduce the coding sequence of polypeptides of the invention into the cells, or alternatively, to disrupt the coding sequence and/or endogenous regulatory sequence associated with the polypeptides of the invention, e.g., by transduction (using viral vectors, and preferably vectors that integrate the transgene into the cell genome) or transfection procedures, including, but not limited to, the use of plasmids, cosmids, YACs, naked DNA, electroporation, liposomes, etc. The coding sequence of the polypeptides of the invention can be placed under the control of a strong constitutive or inducible promoter or promoter/enhancer to achieve expression, and preferably secretion, of the polypeptides of the invention. The engineered cells which express and preferably secrete the polypeptides of the invention can be introduced into the patient systemically, e.g., in the circulation, or intraperitoneally.

[0938] Alternatively, the cells can be incorporated into a matrix and implanted in the body, e.g., genetically engineered fibroblasts can be implanted as part of a skin graft; genetically engineered endothelial cells can be implanted as part of a lymphatic or vascular graft. (See, for example, Anderson et al. U.S. Pat. No. 5,399,349; and Mulligan & Wilson, U.S. Pat. No. 5,460,959 each of which is incorporated by reference herein in its entirety).

[0939] When the cells to be administered are non-autologous or non-MHC compatible cells, they can be administered using well known techniques which prevent the development of a host immune response against the introduced cells. For example, the cells may be introduced in an encapsulated form which, while allowing for an exchange of components with the immediate extracellular environment, does not allow the introduced cells to be recognized by the host immune system.

[0940] Transgenic and “knock-out” animals of the invention have uses which include, but are not limited to, animal model systems useful in elaborating the biological function of polypeptides of the present invention, studying conditions and/or disorders associated with aberrant expression, and in screening for compounds effective in ameliorating such conditions and/or disorders.

### Example 21

### Diabetic Mouse and Glucocorticoid-Impaired Wound Healing Models

[0941] Diabetic db+/db+ Mouse Model.

[0942] To demonstrate that an agonist or antagonist of the invention accelerates the healing process, the genetically diabetic mouse model of wound healing is used. The full thickness wound healing model in the db+/db+ mouse is a well characterized, clinically relevant and reproducible model of impaired wound healing. Healing of the diabetic wound is dependent on formation of granulation tissue and re-epithelialization rather than contraction (Gartner, M. H. et al., J. Surg. Res. 52:389 (1992); Greenhalgh, D. G. et al., Am. J. Pathol. 136:1235 (1990)).

[0943] The diabetic animals have many of the characteristic features observed in Type II diabetes mellitus. Homozygous (db+/db+) mice are obese in comparison to their normal heterozygous (db+/+m) littermates. Mutant diabetic (db+/db+) mice have a single autosomal recessive mutation on chromosome 4 (db+) (Coleman et al. Proc. Natl. Acad. Sci. USA 77:283-293 (1982)). Animals show polyphagia, polydipsia and polyuria. Mutant diabetic mice (db+/db+) have elevated blood glucose, increased or normal insulin levels, and suppressed cell-mediated immunity (Mandel et al., J. Immunol. 120:1375 (1978); Debray-Sachs, M. et al., Clin. Exp. Immunol. 51(1):1-7 (1983); Leiter et al., Am. J. of Pathol. 114:46-55 (1985)). Peripheral neuropathy, myocardial complications, and microvascular lesions, basement membrane thickening and glomerular filtration abnormalities have been described in these animals (Norido, F. et al., Exp. Neurol. 83(2):221-232 (1984); Robertson et al., Diabetes 29(1):60-67 (1980); Giacomelli et al., Lab Invest. 40(4):460-473 (1979); Coleman, D. L., Diabetes 31 (Suppl):1-6 (1982)). These homozygous diabetic mice develop hyperglycemia that is resistant to insulin analogous to human type II diabetes (Mandel et al., J. Immunol. 120:1375-1377 (1978)).

[0944] The characteristics observed in these animals suggests that healing in this model may be similar to the healing observed in human diabetes (Greenhalgh, et al., Am. J. of Pathol. 136:1235-1246 (1990)).

[0945] Genetically diabetic female C57BL/KsJ (db+/db+) mice and their non-diabetic (db+/+m) heterozygous littermates are used in this study (Jackson Laboratories). The animals are purchased at 6 weeks of age and are 8 weeks old at the beginning of the study. Animals are individually housed and received food and water ad libitum. All manipulations are performed using aseptic techniques. The experiments are conducted according to the rules and guidelines of Human Genome Sciences, Inc. Institutional Animal Care and Use Committee and the Guidelines for the Care and Use of Laboratory Animals.

[0946] Wounding protocol is performed according to previously reported methods (Tsuboi, R. and Rifkin, D. B., J. Exp. Med. 172:245-251 (1990)). Briefly, on the day of wounding, animals are anesthetized with an intraperitoneal injection of Avertin (0.01 mg/mL), 2,2,2-tribromoethanol and 2-methyl-2-butanol dissolved in deionized water. The dorsal region of the animal is shaved and the skin washed with 70% ethanol solution and iodine. The surgical area is dried with sterile gauze prior to wounding. An 8 mm full-thickness wound is then created using a Keyes tissue punch. Immediately following wounding, the surrounding skin is gently stretched to eliminate wound expansion. The wounds are left open for the duration of the experiment. Application of the treatment is given topically for 5 consecutive days commencing on the day of wounding. Prior to treatment, wounds are gently cleansed with sterile saline and gauze sponges.

[0947] Wounds are visually examined and photographed at a fixed distance at the day of surgery and at two day intervals thereafter. Wound closure is determined by daily measurement on days 1-5 and on day 8. Wounds are measured horizontally and vertically using a calibrated Jameson caliper. Wounds are considered healed if granulation tissue is no longer visible and the wound is covered by a continuous epithelium.

[0948] An agonist or antagonist of the invention is administered using at a range different doses, from 4 mg to 500 mg per wound per day for 8 days in vehicle. Vehicle control groups received 50 mL of vehicle solution.

[0949] Animals are euthanized on day 8 with an intraperitoneal injection of sodium pentobarbital (300 mg/kg). The wounds and surrounding skin are then harvested for histology and immunohistochemistry. Tissue specimens are placed in 10% neutral buffered formalin in tissue cassettes between biopsy sponges for further processing.

[0950] Three groups of 10 animals each (5 diabetic and 5 non-diabetic controls) are evaluated: 1) Vehicle placebo control, 2) untreated group, and 3) treated group.

[0951] Wound closure is analyzed by measuring the area in the vertical and horizontal axis and obtaining the total square area of the wound. Contraction is then estimated by establishing the differences between the initial wound area (day 0) and that of post treatment (day 8). The wound area on day 1 is 64 mm², the corresponding size of the dermal punch. Calculations are made using the following formula:
[Open area on day 8]−[Open area on day 1]/[Open area on day 1]

[0952] Specimens are fixed in 10% buffered formalin and paraffin embedded blocks are sectioned perpendicular to the wound surface (5 mm) and cut using a Reichert-Jung microtome. Routine hematoxylin-eosin (H&E) staining is performed on cross-sections of bisected wounds. Histologic examination of the wounds are used to assess whether the healing process and the morphologic appearance of the repaired skin is altered by treatment with an agonist or antagonist of the invention. This assessment included verification of the presence of cell accumulation, inflammatory cells, capillaries, fibroblasts, re-epithelialization and epidermal maturity (Greenhalgh, D. G. et al., Am. J. Pathol 136:1235 (1990)). A calibrated lens micrometer is used by a blinded observer.

[0953] Tissue sections are also stained immunohistochemically with a polyclonal rabbit anti-human keratin antibody using ABC Elite detection system. Human skin is used as a positive tissue control while non-immune IgG is used as a negative control. Keratinocyte growth is determined by evaluating the extent of reepithelialization of the wound using a calibrated lens micrometer.

[0954] Proliferating cell nuclear antigen/cyclin (PCNA) in skin specimens is demonstrated by using anti-PCNA antibody (1:50) with an ABC Elite detection system. Human colon cancer served as a positive tissue control and human brain tissue is used as a negative tissue control. Each specimen included a section with omission of the primary antibody and substitution with non-immune mouse IgG. Ranking of these sections is based on the extent of proliferation on a scale of 0-8, the lower side of the scale reflecting slight proliferation to the higher side reflecting intense proliferation.

[0955] Experimental data are analyzed using an unpaired t test. A p value of <0.05 is considered significant.

[0956] Steroid Impaired Rat Model

[0957] The inhibition of wound healing by steroids has been well documented in various in vitro and in vivo systems (Wahl, Glucocorticoids and Wound healing. In: Anti-Inflammatory Steroid Action: Basic and Clinical Aspects. 280-302 (1989); Wahl et al., J. Immunol. 115: 476-481 (1975); Werb et al., J. Exp. Med. 147:1684-1694 (1978)). Glucocorticoids retard wound healing by inhibiting angiogenesis, decreasing vascular permeability (Ebert et al., An. Intern. Med. 37:701-705 (1952)), fibroblast proliferation, and collagen synthesis (Beck et al., Growth Factors. 5: 295-304 (1991); Haynes et al., J. Clin. Invest. 61: 703-797 (1978)) and producing a transient reduction of circulating monocytes (Haynes et al., J. Clin. Invest. 61: 703-797 (1978); Wahl, “Glucocorticoids and wound healing”, In: Antiinflammatory Steroid Action: Basic and Clinical Aspects, Academic Press, New York, pp. 280-302 (1989)). The systemic administration of steroids to impaired wound healing is a well establish phenomenon in rats (Beck et al., Growth Factors. 5: 295-304 (1991); Haynes et al., J. Clin. Invest. 61: 703-797 (1978); Wahl, “Glucocorticoids and wound healing”, In: Antiinflammatory Steroid Action: Basic and Clinical Aspects, Academic Press, New York, pp. 280-302 (1989); Pierce et al., Proc. Natl. Acad. Sci. USA 86: 2229-2233 (1989)).

[0958] To demonstrate that an agonist or antagonist of the invention can accelerate the healing process, the effects of multiple topical applications of the agonist or antagonist on full thickness excisional skin wounds in rats in which healing has been impaired by the systemic administration of methylprednisolone is assessed.

[0959] Young adult male Sprague Dawley rats weighing 250-300 g (Charles River Laboratories) are used in this example. The animals are purchased at 8 weeks of age and are 9 weeks old at the beginning of the study. The healing response of rats is impaired by the systemic administration of methylprednisolone (17 mg/kg/rat intramuscularly) at the time of wounding. Animals are individually housed and received food and water ad libitum. All manipulations are performed using aseptic techniques. This study is conducted according to the rules and guidelines of Human Genome Sciences, Inc. Institutional Animal Care and Use Committee and the Guidelines for the Care and Use of Laboratory Animals.

[0960] The wounding protocol is followed according to section A, above. On the day of wounding, animals are anesthetized with an intramuscular injection of ketamine (50 mg/kg) and xylazine (5 mg/kg). The dorsal region of the animal is shaved and the skin washed with 70% ethanol and iodine solutions. The surgical area is dried with sterile gauze prior to wounding. An 8 mm full-thickness wound is created using a Keyes tissue punch. The wounds are left open for the duration of the experiment. Applications of the testing materials are given topically once a day for 7 consecutive days commencing on the day of wounding and subsequent to methylprednisolone administration. Prior to treatment, wounds are gently cleansed with sterile saline and gauze sponges.

[0961] Wounds are visually examined and photographed at a fixed distance at the day of wounding and at the end of treatment. Wound closure is determined by daily measurement on days 1-5 and on day 8. Wounds are measured horizontally and vertically using a calibrated Jameson caliper. Wounds are considered healed if granulation tissue is no longer visible and the wound is covered by a continuous epithelium.

[0962] The agonist or antagonist of the invention is administered using at a range different doses, from 4 mg to 500 mg per wound per day for 8 days in vehicle. Vehicle control groups received 50 mL of vehicle solution.

[0963] Animals are euthanized on day 8 with an intraperitoneal injection of sodium pentobarbital (300 mg/kg). The wounds and surrounding skin are then harvested for histology. Tissue specimens are placed in 10% neutral buffered formalin in tissue cassettes between biopsy sponges for further processing.

[0964] Three groups of 10 animals each (5 with methylprednisolone and 5 without glucocorticoid) are evaluated: 1) Untreated group 2) Vehicle placebo control 3) treated groups.

[0965] Wound closure is analyzed by measuring the area in the vertical and horizontal axis and obtaining the total area of the wound. Closure is then estimated by establishing the differences between the initial wound area (day 0) and that of post treatment (day 8). The wound area on day 1 is 64 mm², the corresponding size of the dermal punch. Calculations are made using the following formula:
[Open area on day 8]−[Open area on day 1]/[Open area on day 1]

[0966] Specimens are fixed in 10% buffered formalin and paraffin embedded blocks are sectioned perpendicular to the wound surface (5 mm) and cut using an Olympus microtome. Routine hematoxylin-eosin (H&E) staining is performed on cross-sections of bisected wounds. Histologic examination of the wounds allows assessment of whether the healing process and the morphologic appearance of the repaired skin is improved by treatment with an agonist or antagonist of the invention. A calibrated lens micrometer is used by a blinded observer to determine the distance of the wound gap.

[0967] Experimental data are analyzed using an unpaired t test. A p value of <0.05 is considered significant.

[0968] The studies described in this example tested activity of agonists or antagonists of the invention. However, one skilled in the art could easily modify the exemplified studies to test the activity of polynucleotides or polypeptides of the invention (e.g., gene therapy).

### Example 22

### Production of Polypeptide of the Invention for High-Throughput Screening Assays

[0969] The following protocol produces a supernatant containing polypeptide of the present invention to be tested. This supernatant can then be used in the Screening Assays described in Examples 24-27.

[0970] First, dilute Poly-D-Lysine (644 587 Boehringer-Mannheim) stock solution (1 mg/ml in PBS) 1:20 in PBS (w/o calcium or magnesium 17-516F Biowhittaker) for a working solution of 50 ug/ml. Add 200 ul of this solution to each well (24 well plates) and incubate at RT for 20 minutes. Be sure to distribute the solution over each well (note: a 12-channel pipetter may be used with tips on every other channel). Aspirate off the Poly-D-Lysine solution and rinse with 1 ml PBS (Phosphate Buffered Saline). The PBS should remain in the well until just prior to plating the cells and plates may be poly-lysine coated in advance for up to two weeks.

[0971] Plate 293T cells (do not carry cells past P+20) at 2×10⁵ cells/well in 0.5 ml DMEM (Dulbecco's Modified Eagle Medium)(with 4.5 G/L glucose and L-glutamine (12-604F Biowhittaker))/10% heat inactivated FBS (14-503F Biowhittaker)/1× Penstrep (17-602E Biowhittaker). Let the cells grow overnight.

[0972] The next day, mix together in a sterile solution basin: 300 ul Lipofectamine (18324-012 Gibco/BRL) and 5 ml Optimem I (31985070 Gibco/BRL)/96-well plate. With a small volume multi-channel pipetter, aliquot approximately 2 ug of an expression vector containing a polynucleotide insert, produced by the methods described in Examples 8-10, into an appropriately labeled 96-well round bottom plate. With a multi-channel pipetter, add 50 ul of the Lipofectamine/Optimem I mixture to each well. Pipette up and down gently to mix. Incubate at RT 15-45 minutes. After about 20 minutes, use a multi-channel pipetter to add 150 ul Optimem I to each well. As a control, one plate of vector DNA lacking an insert should be transfected with each set of transfections.

[0973] Preferably, the transfection should be performed by tag-teaming the following tasks. By tag-teaming, hands on time is cut in half, and the cells do not spend too much time on PBS. First, person A aspirates off the media from four 24-well plates of cells, and then person B rinses each well with 0.5-1 ml PBS. Person A then aspirates off PBS rinse, and person B, using a 12-channel pipetter with tips on every other channel, adds the 200 ul of DNA/Lipofectamine/Optimem I complex to the odd wells first, then to the even wells, to each row on the 24-well plates. Incubate at 37 degree C. for 6 hours.

[0974] While cells are incubating, prepare appropriate media, either 1% BSA in DMEM with 1× penstrep, or HGS CHO-5 media (116.6 mg/L of CaCl2 (anhyd); 0.00130 mg/L CuSO₄-5H₂O; 0.050 mg/L of Fe(NO₃)₃-9H₂O; 0.417 mg/L of FeSO₄-7H₂O; 311.80 mg/L of Kcl; 28.64 mg/L of MgCl₂; 48.84 mg/L of MgSO₄; 6995.50 mg/L of NaCl; 2400.0 mg/L of NaHCO₃; 62.50 mg/L of NaH₂PO₄—H₂0; 71.02 mg/L of Na₂HPO4; 0.4320 mg/L of ZnSO₄-7H₂0; 0.002 mg/L of Arachidonic Acid; 1.022 mg/L of Cholesterol; 0.070 mg/L of DL-alpha-Tocopherol-Acetate; 0.0520 mg/L of Linoleic Acid; 0.010 mg/L of Linolenic Acid; 0.010 mg/L of Myristic Acid; 0.010 mg/L of Oleic Acid; 0.010 mg/L of Palmitric Acid; 0.010 mg/L of Palmitic Acid; 100 mg/L of Pluronic F-68; 0.010 mg/L of Stearic Acid; 2.20 mg/L of Tween 80; 4551 mg/L of D-Glucose; 130.85 mg/ml of L-Alanine; 147.50 mg/ml of L-Arginine-HCL; 7.50 mg/ml of L-Asparagine-H₂0; 6.65 mg/ml of L-Aspartic Acid; 29.56 mg/ml of L-Cystine-2HCL-H₂0; 31.29 mg/ml of L-Cystine-2HCL; 7.35 mg/ml of L-Glutamic Acid; 365.0 mg/ml of L-Glutamine; 18.75 mg/ml of Glycine; 52.48 mg/ml of L-Histidine-HCL-H₂0; 106.97 mg/ml of L-Isoleucine; 111.45 mg/ml of L-Leucine; 163.75 mg/ml of L-Lysine HCL; 32.34 mg/ml of L-Methionine; 68.48 mg/ml of L-Phenylalainine; 40.0 mg/ml of L-Proline; 26.25 mg/ml of L-Serine; 101.05 mg/ml of L-Threonine; 19.22 mg/ml of L-Tryptophan; 91.79 mg/ml of L-Tryrosine-2Na-2H₂O; and 99.65 mg/ml of L-Valine; 0.0035 mg/L of Biotin; 3.24 mg/L of D-Ca Pantothenate; 11.78 mg/L of Choline Chloride; 4.65 mg/L of Folic Acid; 15.60 mg/L of i-Inositol; 3.02 mg/L of Niacinamide; 3.00 mg/L of Pyridoxal HCL; 0.031 mg/L of Pyridoxine HCL; 0.319 mg/L of Riboflavin; 3.17 mg/L of Thiamine HCL; 0.365 mg/L of Thymidine; 0.680 mg/L of Vitamin B₁₂; 25 mM of HEPES Buffer; 2.39 mg/L of Na Hypoxanthine; 0.105 mg/L of Lipoic Acid; 0.081 mg/L of Sodium Putrescine-2HCL; 55.0 mg/L of Sodium Pyruvate; 0.0067 mg/L of Sodium Selenite; 20 uM of Ethanolamine; 0.122 mg/L of Ferric Citrate; 41.70 mg/L of Methyl-B-Cyclodextrin complexed with Linoleic Acid; 33.33 mg/L of Methyl-B-Cyclodextrin complexed with Oleic Acid; 10 mg/L of Methyl-B-Cyclodextrin complexed with Retinal Acetate. Adjust osmolarity to 327 mOsm) with 2 mm glutamine and 1× penstrep. (BSA (81-068-3 Bayer) 100 gm dissolved in 1 L DMEM for a 10% BSA stock solution). Filter the media and collect 50 ul for endotoxin assay in 15 ml polystyrene conical.

[0975] The transfection reaction is terminated, preferably by tag-teaming, at the end of the incubation period. Person A aspirates off the transfection media, while person B adds 1.5 ml appropriate media to each well. Incubate at 37 degree C. for 45 or 72 hours depending on the media used: 1% BSA for 45 hours or CHO-5 for 72 hours.

[0976] On day four, using a 300 ul multichannel pipetter, aliquot 600 ul in one 1 ml deep well plate and the remaining supernatant into a 2 ml deep well. The supernatants from each well can then be used in the assays described in Examples 24-27.

[0977] It is specifically understood that when activity is obtained in any of the assays described below using a supernatant, the activity originates from either the polypeptide of the present invention directly (e.g., as a secreted protein) or by polypeptide of the present invention inducing expression of other proteins, which are then secreted into the supernatant. Thus, the invention further provides a method of identifying the protein in the supernatant characterized by an activity in a particular assay.

### Example 23

### Construction of GAS Reporter Construct

[0978] One signal transduction pathway involved in the differentiation and proliferation of cells is called the Jaks-STATs pathway. Activated proteins in the Jaks-STATs pathway bind to gamma activation site “GAS” elements or interferon-sensitive responsive element (“ISRE”), located in the promoter of many genes. The binding of a protein to these elements alter the expression of the associated gene.

[0979] GAS and ISRE elements are recognized by a class of transcription factors called Signal Transducers and Activators of Transcription, or “STATs.” There are six members of the STATs family. Stat1 and Stat3 are present in many cell types, as is Stat2 (as response to IFN-alpha is widespread). Stat4 is more restricted and is not in many cell types though it has been found in T helper class I, cells after treatment with IL-12. Stat5 was originally called mammary growth factor, but has been found at higher concentrations in other cells including myeloid cells. It can be activated in tissue culture cells by many cytokines.

[0980] The STATs are activated to translocate from the cytoplasm to the nucleus upon tyrosine phosphorylation by a set of kinases known as the Janus Kinase (“Jaks”) family. Jaks represent a distinct family of soluble tyrosine kinases and include Tyk2, Jak1, Jak2, and Jak3. These kinases display significant sequence similarity and are generally catalytically inactive in resting cells.

[0981] The Jaks are activated by a wide range of receptors summarized in the Table below. (Adapted from review by Schidler and Damell, Ann. Rev. Biochem. 64:621-51 (1995)). A cytokine receptor family, capable of activating Jaks, is divided into two groups: (a) Class 1 includes receptors for IL-2, IL-3, IL-4, IL-6, IL-7, IL-9, IL-11, IL-12, IL-15, Epo, PRL, GH, G-CSF, GM-CSF, LIF, CNTF, and thrombopoietin; and (b) Class 2 includes IFN-a, IFN-g, and IL-10. The Class I receptors share a conserved cysteine motif (a set of four conserved cysteines and one tryptophan) and a WSXWS motif (a membrane proximal region encoding Trp-Ser-Xaa-Trp-Ser (SEQ ID NO: 2)).

[0982] Thus, on binding of a ligand to a receptor, Jaks are activated, which in turn activate STATs, which then translocate and bind to GAS elements. This entire process is encompassed in the Jaks-STATs signal transduction pathway. Therefore, activation of the Jaks-STATs pathway, reflected by the binding of the GAS or the ISRE element, can be used to indicate proteins involved in the proliferation and differentiation of cells. For example, growth factors and cytokines are known to activate the Jaks-STATs pathway (See Table below). Thus, by using GAS elements linked to reporter molecules, activators of the Jaks-STATs pathway can be identified.

| | JAKs | | | | | |
|---|---|---|---|---|---|---|
| Ligand | tyk2 | Jak1 | Jak2 | Jak3 | STATS | GAS (elements) or ISRE |
| IFN family | | | | | | |
| IFN-a/B | + | + | − | − | 1, 2, 3 | ISRE |
| IFN-g | | + | + | − | 1 | GAS (IRF1 > Lys6 > IFP) |
| Il-10 | + | ? | ? | − | 1, 3 | |
| gp130 family | | | | | | |
| IL-6 (Pleiotropic) | + | + | + | ? | 1, 3 | GAS (IRF1 > Lys6 > IFP) |
| Il-11 (Pleiotropic) | ? | + | ? | ? | 1, 3 | |
| OnM (Pleiotropic) | ? | + | + | ? | 1, 3 | |
| LIF (Pleiotropic) | ? | + | + | ? | 1, 3 | |
| CNTF (Pleiotropic) | −/+ | + | + | ? | 1, 3 | |
| G-CSF (Pleiotropic) | ? | + | ? | ? | 1, 3 | |
| IL-12 (Pleiotropic) | + | − | + | + | 1, 3 | |
| g-C family | | | | | | |
| IL-2 (lymphocytes) | − | + | − | + | 1, 3, 5 | GAS |
| IL-4 (lymph/myeloid) | − | + | − | + | 6 | GAS (IRF1 = IFP >> Ly6)(IgH) |
| IL-7 (lymphocytes) | − | + | − | + | 5 | GAS |
| IL-9 (lymphocytes) | − | + | − | + | 5 | GAS |
| IL-13 (lymphocyte) | − | + | ? | ? | 6 | GAS |
| IL-15 | ? | + | ? | + | 5 | GAS |
| gp140 family | | | | | | |
| IL-3 (myeloid) | − | − | + | − | 5 | GAS (IRF1 > IFP >> Ly6) |
| IL-5 (myeloid) | − | − | + | − | 5 | GAS |
| GM-CSF (myeloid) | − | − | + | − | 5 | GAS |
| Growth hormone family | | | | | | |
| GH | ? | − | + | − | 5 | |
| PRL | ? | +/− | + | − | 1, 3, 5 | |
| EPO | ? | − | + | − | 5 | GAS (B- |
| | | | | | | CAS > IRF1 = IFP >> Ly6) |
| Receptor Tyrosine Kinases | | | | | | |
| EGF | ? | + | + | − | 1, 3 | GAS (IRF1) |
| PDGF | ? | + | + | − | 1, 3 | |
| CSF-1 | ? | + | + | − | 1, 3 | GAS (not IRF1) |

[0983] To construct a synthetic GAS containing promoter element a PCR based strategy is employed to generate a GAS-SV40 promoter sequence. The 5′ primer contains four tandem copies of the GAS binding site found in the IRF1 promoter and previously demonstrated to bind STATs upon induction with a range of cytokines (Rothman et al., Immunity 1:457-468 (1994).), although other GAS or ISRE elements can be used instead. The 5′ primer also contains 18 bp of sequence complementary to the SV40 early promoter sequence and is flanked with an XhoI site. The sequence of the 5′ primer is:

| | |
|---|---|
| 5′:GCGCCTCGAGATTTCCCCGAAATCTAGATTTCCC | (SEQ ID NO:3) |
| CGAAATGATTTCCCCGAAATGATTTCCCCGAAATATC | |
| TGCCATCTCAATTAG:3′ | |

[0984] The downstream primer is complementary to the SV40 promoter and is flanked with a Hind III site: 5′:GCGGCAAGCTTTTTGCAAAGCCTAGGC:3′ (SEQ ID NO: 4)

[0985] PCR amplification is performed using the SV40 promoter template present in the B-gal:promoter plasmid obtained from Clontech. The resulting PCR fragment is digested with XhoI/Hind III and subcloned into BLSK2−. (Stratagene.) Sequencing with forward and reverse primers confirms that the insert contains the following sequence:

| | |
|---|---|
| 5′:CTCGAGATTTCCCCGAAATCTAGATTTCCCCGAA | (SEQ ID NO:5) |
| ATGATTTCCCCGAAATGATTTCCCCGAAATATCTGCC | |
| ATCTCAATTAGTCAGCAACCATAGTCCCGCCCCTAAC | |
| TCCGCCCATCCCGCCCCTAACTCCGCCCAGTTCCGCC | |
| CATTCTCCGCCCCATGGCTGACTAATTTTTTTTATTT | |
| ATGCAGAGGGCGAGGCCGCCTCGGCCTCTGAGCTATT | |
| CCAGAAGTAGTGAGGAGGCTTTTTTGGAGGCCTAGGC | |
| TTTTGCAAAAAGCTT:3′ | |

[0986] With this GAS promoter element linked to the SV40 promoter, a GAS:SEAP2 reporter construct is next engineered. Here, the reporter molecule is a secreted alkaline phosphatase, or “SEAP.” Clearly, however, any reporter molecule can be instead of SEAP, in this or in any of the other Examples. Well known reporter molecules that can be used instead of SEAP include chloramphenicol acetyltransferase (CAT), luciferase, alkaline phosphatase, B-galactosidase, green fluorescent protein (GFP), or any protein detectable by an antibody.

[0987] The above sequence confirmed synthetic GAS-SV40 promoter element is subcloned into the pSEAP-Promoter vector obtained from Clontech using HindIII and XhoI, effectively replacing the SV40 promoter with the amplified GAS:SV40 promoter element, to create the GAS-SEAP vector. However, this vector does not contain a neomycin resistance gene, and therefore, is not preferred for mammalian expression systems.

[0988] Thus, in order to generate mammalian stable cell lines expressing the GAS-SEAP reporter, the GAS-SEAP cassette is removed from the GAS-SEAP vector using SalI and NotI, and inserted into a backbone vector containing the neomycin resistance gene, such as pGFP-1 (Clontech), using these restriction sites in the multiple cloning site, to create the GAS-SEAP/Neo vector. Once this vector is transfected into mammalian cells, this vector can then be used as a reporter molecule for GAS binding.

[0989] Other constructs can be made using the above description and replacing GAS with a different promoter sequence, for example, with EGR and NF-KB promoter sequences. However, many other promoters can be substituted using the protocols described in these Examples. For instance, SRE, IL-2, NFAT, or Osteocalcin promoters can be substituted, alone or in combination (e.g., GAS/NF-KB/EGR, GAS/NF-KB, Il-2/NFAT, or NF-KB/GAS). Similarly, other cell lines can be used to test reporter construct activity, such as HELA (epithelial), HUVEC (endothelial), Reh (B-cell), Saos-2 (osteoblast), HUVAC (aortic), or Cardiomyocyte.

### Example 24

### Assay for SEAP Activity

[0990] SEAP activity is assayed using the Tropix Phospho-light Kit (Cat. BP-400) according to the following general procedure. The Tropix Phospho-light Kit supplies the Dilution, Assay, and Reaction Buffers used below.

[0991] Prime a dispenser with the 2.5× Dilution Buffer and dispense 15 ul of 2.5× dilution buffer into Optiplates containing 35 ul of a supernatant. Seal the plates with a plastic sealer and incubate at 65 degree C. for 30 min. Separate the Optiplates to avoid uneven heating.

[0992] Cool the samples to room temperature for 15 minutes. Empty the dispenser and prime with the Assay Buffer. Add 50 ml Assay Buffer and incubate at room temperature 5 min. Empty the dispenser and prime with the Reaction Buffer (see the Table below). Add 50 ul Reaction Buffer and incubate at room temperature for 20 minutes. Since the intensity of the chemiluminescent signal is time dependent, and it takes about 10 minutes to read 5 plates on a luminometer, thus one should treat 5 plates at each time and start the second set 10 minutes later.

[0993] Read the relative light unit in the luminometer. Set H12 as blank, and print the results. An increase in chemiluminescence indicates reporter activity.

Reaction Buffer Formulation:

| # of plates | Rxn buffer diluent (ml) | CSPD (ml) |
|---|---|---|
| 10 | 60 | 3 |
| 11 | 65 | 3.25 |
| 12 | 70 | 3.5 |
| 13 | 75 | 3.75 |
| 14 | 80 | 4 |
| 15 | 85 | 4.25 |
| 16 | 90 | 4.5 |
| 17 | 95 | 4.75 |
| 18 | 100 | 5 |
| 19 | 105 | 5.25 |
| 20 | 110 | 5.5 |
| 21 | 115 | 5.75 |
| 22 | 120 | 6 |
| 23 | 125 | 6.25 |
| 24 | 130 | 6.5 |
| 25 | 135 | 6.75 |
| 26 | 140 | 7 |
| 27 | 145 | 7.25 |
| 28 | 150 | 7.5 |
| 29 | 155 | 7.75 |
| 30 | 160 | 8 |
| 31 | 165 | 8.25 |
| 32 | 170 | 8.5 |
| 33 | 175 | 8.75 |
| 34 | 180 | 9 |
| 35 | 185 | 9.25 |
| 36 | 190 | 9.5 |
| 37 | 195 | 9.75 |
| 38 | 200 | 10 |
| 39 | 205 | 10.25 |
| 40 | 210 | 10.5 |
| 41 | 215 | 10.75 |
| 42 | 220 | 11 |
| 43 | 225 | 11.25 |
| 44 | 230 | 11.5 |
| 45 | 235 | 11.75 |
| 46 | 240 | 12 |
| 47 | 245 | 12.25 |
| 48 | 250 | 12.5 |
| 49 | 255 | 12.75 |
| 50 | 260 | 13 |

### Example 25

### High-Throughput Screening Assay Identifying Changes in Small Molecule Concentration and Membrane Permeability

[0994] Binding of a ligand to a receptor is known to alter intracellular levels of small molecules, such as calcium, potassium, sodium, and pH, as well as alter membrane potential. These alterations can be measured in an assay to identify supernatants which bind to receptors of a particular cell. Although the following protocol describes an assay for calcium, this protocol can easily be modified to detect changes in potassium, sodium, pH, membrane potential, or any other small molecule which is detectable by a fluorescent probe.

[0995] The following assay uses Fluorometric Imaging Plate Reader (“FLIPR”) to measure changes in fluorescent molecules (Molecular Probes) that bind small molecules. Clearly, any fluorescent molecule detecting a small molecule can be used instead of the calcium fluorescent molecule, fluo-4 (Molecular Probes, Inc.; catalog no. F-14202), used here.

[0996] For adherent cells, seed the cells at 10,000 cells/well in a Co-star black 96-well plate with clear bottom. The plate is incubated in a CO₂ incubator for 20 hours. The adherent cells are washed two times in Biotek washer with 200 ul of HBSS (Hank's Balanced Salt Solution) leaving 100 ul of buffer after the final wash.

[0997] A stock solution of 1 mg/ml fluo-4 is made in 10% pluronic acid DMSO. To load the cells with fluo-4, 50 ul of 12 ug/ml fluo-4 is added to each well. The plate is incubated at 37 degrees C. in a CO₂ incubator for 60 min. The plate is washed four times in the Biotek washer with HBSS leaving 100 ul of buffer.

[0998] For non-adherent cells, the cells are spun down from culture media. Cells are re-suspended to 2-5×10⁶ cells/ml with HBSS in a 50-ml conical tube. 4 ul of 1 mg/ml fluo-4 solution in 10% pluronic acid DMSO is added to each ml of cell suspension. The tube is then placed in a 37 degrees C. water bath for 30-60 min. The cells are washed twice with HBSS, resuspended to 1×10⁶ cells/ml, and dispensed into a microplate, 100 ul/well. The plate is centrifuged at 1000 rpm for 5 min. The plate is then washed once in Denley Cell Wash with 200 ul, followed by an aspiration step to 100 ul final volume.

[0999] For a non-cell based assay, each well contains a fluorescent molecule, such as fluo-4. The supernatant is added to the well, and a change in fluorescence is detected.

[1000] To measure the fluorescence of intracellular calcium, the FLIPR is set for the following parameters: (1) System gain is 300-800 mW; (2) Exposure time is 0.4 second; (3) Camera F/stop is F/2; (4) Excitation is 488 nm; (5) Emission is 530 nm; and (6) Sample addition is 50 ul. Increased emission at 530 nm indicates an extracellular signaling event caused by the a molecule, either polypeptide of the present invention or a molecule induced by polypeptide of the present invention, which has resulted in an increase in the intracellular Ca⁺⁺ concentration.

### Example 26

### High-Throughput Screening Assay Identifying Tyrosine Kinase Activity

[1001] The Protein Tyrosine Kinases (PTK) represent a diverse group of transmembrane and cytoplasmic kinases. Within the Receptor Protein Tyrosine Kinase RPTK) group are receptors for a range of mitogenic and metabolic growth factors including the PDGF, FGF, EGF, NGF, HGF and Insulin receptor subfamilies. In addition there are a large family of RPTKs for which the corresponding ligand is unknown. Ligands for RPTKs include mainly secreted small proteins, but also membrane-bound and extracellular matrix proteins.

[1002] Activation of RPTK by ligands involves ligand-mediated receptor dimerization, resulting in transphosphorylation of the receptor subunits and activation of the cytoplasmic tyrosine kinases. The cytoplasmic tyrosine kinases include receptor associated tyrosine kinases of the src-family (e.g., src, yes, lck, lyn, fyn) and non-receptor linked and cytosolic protein tyrosine kinases, such as the Jak family, members of which mediate signal transduction triggered by the cytokine superfamily of receptors (e.g., the Interleukins, Interferons, GM-CSF, and Leptin).

[1003] Because of the wide range of known factors capable of stimulating tyrosine kinase activity, identifying whether polypeptide of the present invention or a molecule induced by polypeptide of the present invention is capable of activating tyrosine kinase signal transduction pathways is of interest. Therefore, the following protocol is designed to identify such molecules capable of activating the tyrosine kinase signal transduction pathways.

[1004] Seed target cells (e.g., primary keratinocytes) at a density of approximately 25,000 cells per well in a 96 well Loprodyne Silent Screen Plates purchased from Nalge Nunc (Naperville, Ill.). The plates are sterilized with two 30 minute rinses with 100% ethanol, rinsed with water and dried overnight. Some plates are coated for 2 hr with 100 ml of cell culture grade type I collagen (50 mg/ml), gelatin (2%) or polylysine (50 mg/ml), all of which can be purchased from Sigma Chemicals (St. Louis, Mo.) or 10% Matrigel purchased from Becton Dickinson (Bedford, Mass.), or calf serum, rinsed with PBS and stored at 4 degree C. Cell growth on these plates is assayed by seeding 5,000 cells/well in growth medium and indirect quantitation of cell number through use of alamarBlue as described by the manufacturer Alamar Biosciences, Inc. (Sacramento, Calif.) after 48 hr. Falcon plate covers #3071 from Becton Dickinson (Bedford, Mass.) are used to cover the Loprodyne Silent Screen Plates. Falcon Microtest III cell culture plates can also be used in some proliferation experiments.

[1005] To prepare extracts, A431 cells are seeded onto the nylon membranes of Loprodyne plates (20,000/200 ml/well) and cultured overnight in complete medium. Cells are quiesced by incubation in serum-free basal medium for 24 hr. After 5-20 minutes treatment with EGF (60 ng/ml) or 50 ul of the supernatant produced in Example 22, the medium was removed and 100 ml of extraction buffer ((20 mM HEPES pH 7.5, 0.15 M NaCl, 1% Triton X-100, 0.1% SDS, 2 mM Na3VO4, 2 mM Na4P2O7 and a cocktail of protease inhibitors (# 1836170) obtained from Boeheringer Mannheim (Indianapolis, Ind.)) is added to each well and the plate is shaken on a rotating shaker for 5 minutes at 4° C. The plate is then placed in a vacuum transfer manifold and the extract filtered through the 0.45 mm membrane bottoms of each well using house vacuum. Extracts are collected in a 96-well catch/assay plate in the bottom of the vacuum manifold and immediately placed on ice. To obtain extracts clarified by centrifugation, the content of each well, after detergent solubilization for 5 minutes, is removed and centrifuged for 15 minutes at 4 degree Cat 16,000×g.

[1006] Test the filtered extracts for levels of tyrosine kinase activity. Although many methods of detecting tyrosine kinase activity are known, one method is described here.

[1007] Generally, the tyrosine kinase activity of a supernatant is evaluated by determining its ability to phosphorylate a tyrosine residue on a specific substrate (a biotinylated peptide). Biotinylated peptides that can be used for this purpose include PSK1 (corresponding to amino acids 6-20 of the cell division kinase cdc2-p34) and PSK2 (corresponding to amino acids 1-17 of gastrin). Both peptides are substrates for a range of tyrosine kinases and are available from Boehringer Mannheim.

[1008] The tyrosine kinase reaction is set up by adding the following components in order. First, add 10 ul of 5 uM Biotinylated Peptide, then 10 ul ATP/Mg₂₊ (5 mM ATP/50 mM MgCl₂), then 10 ul of 5× Assay Buffer (40 mM imidazole hydrochloride, pH7.3, 40 mM beta-glycerophosphate, 1 mM EGTA, 100 mM MgCl₂, 5 mM MnCl₂, 0.5 mg/ml BSA), then 5 ul of Sodium Vanadate (1 mM), and then 5 ul of water. Mix the components gently and preincubate the reaction mix at 30 degree C. for 2 min. Initial the reaction by adding 10 ul of the control enzyme or the filtered supernatant.

[1009] The tyrosine kinase assay reaction is then terminated by adding 10 ul of 120 mm EDTA and place the reactions on ice.

[1010] Tyrosine kinase activity is determined by transferring 50 ul aliquot of reaction mixture to a microtiter plate (MTP) module and incubating at 37 degree C. for 20 min. This allows the streptavidin coated 96 well plate to associate with the biotinylated peptide. Wash the MTP module with 300 ul/well of PBS four times. Next add 75 ul of anti-phospotyrosine antibody conjugated to horse radish peroxidase (anti-P-Tyr-POD (0.5 u/ml)) to each well and incubate at 37 degree C. for one hour. Wash the well as above.

[1011] Next add 100 ul of peroxidase substrate solution (Boehringer Mannheim) and incubate at room temperature for at least 5 mins (up to 30 min). Measure the absorbance of the sample at 405 nm by using ELISA reader. The level of bound peroxidase activity is quantitated using an ELISA reader and reflects the level of tyrosine kinase activity.

### Example 27

### High-Throughput Screening Assay Identifying Phosphorylation Activity

[1012] As a potential alternative and/or complement to the assay of protein tyrosine kinase activity described in Example 26, an assay which detects activation (phosphorylation) of major intracellular signal transduction intermediates can also be used. For example, as described below one particular assay can detect tyrosine phosphorylation of the Erk-1 and Erk-2 kinases. However, phosphorylation of other molecules, such as Raf, JNK, p38 MAP, Map kinase kinase (MEK), MEK kinase, Src, Muscle specific kinase (MuSK), IRAK, Tec, and Janus, as well as any other phosphoserine, phosphotyrosine, or phosphothreonine molecule, can be detected by substituting these molecules for Erk-1 or Erk-2 in the following assay.

[1013] Specifically, assay plates are made by coating the wells of a 96-well ELISA plate with 0.1 ml of protein G (1 ug/ml) for 2 hr at room temp, (RT). The plates are then rinsed with PBS and blocked with 3% BSA/PBS for 1 hr at RT. The protein G plates are then treated with 2 commercial monoclonal antibodies (100 ng/well) against Erk-1 and Erk-2 (1 hr at RT) (Santa Cruz Biotechnology). (To detect other molecules, this step can easily be modified by substituting a monoclonal antibody detecting any of the above described molecules.) After 3-5 rinses with PBS, the plates are stored at 4 degree C. until use.

[1014] A431 cells are seeded at 20,000/well in a 96-well Loprodyne filterplate and cultured overnight in growth medium. The cells are then starved for 48 hr in basal medium (DMEM) and then treated with EGF (6 ng/well) or 50 ul of the supernatants obtained in Example 22 for 5-20 minutes. The cells are then solubilized and extracts filtered directly into the assay plate.

[1015] After incubation with the extract for 1 hr at RT, the wells are again rinsed. As a positive control, a commercial preparation of MAP kinase (10 ng/well) is used in place of A431 extract. Plates are then treated with a commercial polyclonal (rabbit) antibody (1 ug/ml) which specifically recognizes the phosphorylated epitope of the Erk-1 and Erk-2 kinases (1 hr at RT). This antibody is biotinylated by standard procedures. The bound polyclonal antibody is then quantitated by successive incubations with Europium-streptavidin and Europium fluorescence enhancing reagent in the Wallac DELFIA instrument (time-resolved fluorescence). An increased fluorescent signal over background indicates a phosphorylation by polypeptide of the present invention or a molecule induced by polypeptide of the present invention.

### Example 28

### Detection of Inhibition of a Mixed Lymphocyte Reaction

[1016] This assay can be used to detect and evaluate inhibition of a Mixed Lymphocyte Reaction (MLR) by gene products (e.g., isolated polypeptides). Inhibition of a MLR may be due to a direct effect on cell proliferation and viability, modulation of costimulatory molecules on interacting cells, modulation of adhesiveness between lymphocytes and accessory cells, or modulation of cytokine production by accessory cells. Multiple cells may be targeted by these polypeptides since the peripheral blood mononuclear fraction used in this assay includes T, B and natural killer lymphocytes, as well as monocytes and dendritic cells.

[1017] Polypeptides of interest found to inhibit the MLR may find application in diseases associated with lymphocyte and monocyte activation or proliferation. These include, but are not limited to, diseases such as asthma, arthritis, diabetes, inflammatory skin conditions, psoriasis, eczema, systemic lupus erythematosus, multiple sclerosis, glomerulonephritis, inflammatory bowel disease, crohn's disease, ulcerative colitis, arteriosclerosis, cirrhosis, graft vs. host disease, host vs. graft disease, hepatitis, leukemia and lymphoma.

[1018] Briefly, PBMCs from human donors are purified by density gradient centrifugation using Lymphocyte Separation Medium (LSM®, density 1.0770 g/ml, Organon Teknika Corporation, West Chester, Pa.). PBMCs from two donors are adjusted to 2×10⁶ cells/ml in RPMI-1640 (Life Technologies, Grand Island, N.Y.) supplemented with 10% FCS and 2 mM glutamine. PBMCs from a third donor is adjusted to 2×10⁵ cells/ml. Fifty microliters of PBMCs from each donor is added to wells of a 96-well round bottom microtiter plate. Dilutions of test materials (50 μl) is added in triplicate to microtiter wells. Test samples (of the protein of interest) are added for final dilution of 1:4; rhuIL-2 (R&D Systems, Minneapolis, Minn., catalog number 202-IL) is added to a final concentration of 1 μg/ml; anti-CD4 mAb (R&D Systems, clone 34930.11, catalog number MAB379) is added to a final concentration of 10 μg/ml. Cells are cultured for 7-8 days at 37° C. in 5% CO₂, and 1 μC of [3H] thymidine is added to wells for the last 16 hrs of culture. Cells are harvested and thymidine incorporation determined using a Packard TopCount. Data is expressed as the mean and standard deviation of triplicate determinations.

[1019] Samples of the protein of interest are screened in separate experiments and compared to the negative control treatment, anti-CD4 mAb, which inhibits proliferation of lymphocytes and the positive control treatment, IL-2 (either as recombinant material or supernatant), which enhances proliferation of lymphocytes.

[1020] One skilled in the art could easily modify the exemplified studies to test the activity of polynucleotides (e.g., gene therapy), antibodies, agonists, and/or antagonists and fragments and variants thereof.

### Example 29

### Assays for Protease Activity

[1021] The following assay may be used to assess protease activity of the polypeptides of the invention.

[1022] Gelatin and casein zymography are performed essentially as described (Heusen et al., Anal. Biochem., 102:196-202 (1980); Wilson et al., Journal of Urology, 149:653-658 (1993)). Samples are run on 10% polyacryamide/0.1% SDS gels containing 1% gelain orcasein, soaked in 2.5% triton at room temperature for 1 hour, and in 0.1M glycine, pH 8.3 at 37° C. 5 to 16 hours. After staining in amido black areas of proteolysis apear as clear areas agains the blue-black background. Trypsin (Sigma T8642) is used as a positive control.

[1023] Protease activity is also determined by monitoring the cleavage of n-a-benzoyl-L-arginine ethyl ester (BAEE) (Sigma B-4500. Reactions are set up in (25 mMNaPO₄, 1 mM EDTA, and 1 mM BAEE), pH 7.5. Samples are added and the change in adsorbance at 260 nm is monitored on the Beckman DU-6 spectrophotometer in the time-drive mode. Trypsin is used as a positive control.

[1024] Additional assays based upon the release of acid-soluble peptides from casein or hemoglobin measured as adsorbance at 280 nm or colorimetrically using the Folin method are performed as described in Bergmeyer, et al., Methods of Enzymatic Analysis, 5 (1984). Other assays involve the solubilization of chromogenic substrates (Ward, Applied Science, 251-317 (1983)).

### Example 30

### Identifying Serine Protease Substrate Specificity

[1025] Methods known in the art or described herein may be used to determine the substrate specificity of the polypeptides of the present invention having serine protease activity. A preferred method of determining substrate specificity is by the use of positional scanning synthetic combinatorial libraries as described in GB 2 324 529 (incorporated herein in its entirety).

### Example 31

### Ligand Binding Assays

[1026] The following assay may be used to assess ligand binding activity of the polypeptides of the invention.

[1027] Ligand binding assays provide a direct method for ascertaining receptor pharmacology and are adaptable to a high throughput format. The purified ligand for a polypeptide is radiolabeled to high specific activity (50-2000 Ci/mmol) for binding studies. A determination is then made that the process of radiolabeling does not diminish the activity of the ligand towards its polypeptide. Assay conditions for buffers, ions, pH and other modulators such as nucleotides are optimized to establish a workable signal to noise ratio for both membrane and whole cell polypeptide sources. For these assays, specific polypeptide binding is defined as total associated radioactivity minus the radioactivity measured in the presence of an excess of unlabeled competing ligand. Where possible, more than one competing ligand is used to define residual nonspecific binding.

### Example 32

### Functional Assay in Xenopus oocytes

[1028] Capped RNA transcripts from linearized plasmid templates encoding the polypeptides of the invention are synthesized in vitro with RNA polymerases in accordance with standard procedures. In vitro transcripts are suspended in water at a final concentration of 0.2 mg/ml. Ovarian lobes are removed from adult female toads, Stage V defolliculated oocytes are obtained, and RNA transcripts (10 ng/oocytc) are injected in a 50 nl bolus using a microinjection apparatus. Two electrode voltage clamps are used to measure the currents from individual Xenopus oocytes in response polypeptides and polypeptide agonist exposure. Recordings are made in Ca2+ free Barth's medium at room temperature. The Xenopus system can be used to screen known ligands and tissue/cell extracts for activating ligands.

### Example 33

### Microphysiometric Assays

[1029] Activation of a wide variety of secondary messenger systems results in extrusion of small amounts of acid from a cell. The acid formed is largely as a result of the increased metabolic activity required to fuel the intracellular signaling process. The pH changes in the media surrounding the cell are very small but are detectable by the CYTOSENSOR microphysiometer (Molecular Devices Ltd., Menlo Park, Calif.). The CYTOSENSOR is thus capable of detecting the activation of polypeptide which is coupled to an energy utilizing intracellular signaling pathway.

### Example 34

### Extract/Cell Supernatant Screening

[1030] A large number of mammalian receptors exist for which there remains, as yet, no cognate activating ligand (agonist). Thus, active ligands for these receptors may not be included within the ligands banks as identified to date. Accordingly, the polypeptides of the invention can also be functionally screened (using calcium, cAMP, microphysiometer, oocyte electrophysiology, etc., functional screens) against tissue extracts to identify its natural ligands. Extracts that produce positive functional responses can be sequentially subfractionated until an activating ligand is isolated and identified.

### Example 35

### Calcium and cAMP Functional Assays

[1031] Seven transmembrane receptors which are expressed in HEK 293 cells have been shown to be coupled functionally to activation of PLC and calcium mobilization and/or cAMP stimulation or inhibition. Basal calcium levels in the HEK 293 cells in receptor-transfected or vector control cells were observed to be in the normal, 100 nM to 200 nM, range. HEK 293 cells expressing recombinant receptors are loaded with fura 2 and in a single day >150 selected ligands or tissue/cell extracts are evaluated for agonist induced calcium mobilization. Similarly, HEK 293 cells expressing recombinant receptors are evaluated for the stimulation or inhibition of cAMP production using standard cAMP quantitation assays. Agonists presenting a calcium transient or cAMP fluctuation are tested in vector control cells to determine if the response is unique to the transfected cells expressing receptor.

### Example 36

### ATP-Binding Assay

[1032] The following assay may be used to assess ATP-binding activity of polypeptides of the invention.

[1033] ATP-binding activity of the polypeptides of the invention may be detected using the ATP-binding assay described in U.S. Pat. No. 5,858,719, which is herein incorporated by reference in its entirety. Briefly, ATP-binding to polypeptides of the invention is measured via photoaffinity labeling with 8-azido-ATP in a competition assay. Reaction mixtures containing 1 mg/ml of the ABC transport protein of the present invention are incubated with varying concentrations of ATP, or the non-hydrolyzable ATP analog adenyl-5′-imidodiphosphate for 10 minutes at 4° C. A mixture of 8-azido-ATP (Sigma Chem. Corp., St. Louis, Mo.) plus 8-azido-ATP (³²P-ATP) (5 mCi/μmol, ICN, Irvine Calif.) is added to a final concentration of 100 μM and 0.5 ml aliquots are placed in the wells of a porcelain spot plate on ice. The plate is irradiated using a short wave 254 nm UV lamp at a distance of 2.5 cm from the plate for two one-minute intervals with a one-minute cooling interval in between. The reaction is stopped by addition of dithiothreitol to a final concentration of 2 mM. The incubations are subjected to SDS-PAGE electrophoresis, dried, and autoradiographed. Protein bands corresponding to the particular polypeptides of the invention are excised, and the radioactivity quantified. A decrease in radioactivity with increasing ATP or adenly-5′-imidodiphosphate provides a measure of ATP affinity to the polypeptides.

### Example 37

### Small Molecule Screening

[1034] This invention is particularly useful for screening therapeutic compounds by using the polypeptides of the invention, or binding fragments thereof, in any of a variety of drug screening techniques. The polypeptide or fragment employed in such a test may be affixed to a solid support, expressed on a cell surface, free in solution, or located intracellularly. One method of drug screening utilizes eukaryotic or prokaryotic host cells which are stably transformed with recombinant nucleic acids expressing the polypeptide or fragment. Drugs are screened against such transformed cells in competitive binding assays. One may measure, for example, the formulation of complexes between the agent being tested and polypeptide of the invention.

[1035] Thus, the present invention provides methods of screening for drugs or any other agents which affect activities mediated by the polypeptides of the invention. These methods comprise contacting such an agent with a polypeptide of the invention or fragment thereof and assaying for the presence of a complex between the agent and the polypeptide or fragment thereof, by methods well known in the art. In such a competitive binding assay, the agents to screen are typically labeled. Following incubation, free agent is separated from that present in bound form, and the amount of free or uncomplexed label is a measure of the ability of a particular agent to bind to the polypeptides of the invention.

[1036] Another technique for drug screening provides high throughput screening for compounds having suitable binding affinity to the polypeptides of the invention, and is described in great detail in European Patent Application 84/03564, published on Sep. 13, 1984, which is herein incorporated by reference in its entirety. Briefly stated, large numbers of different small molecule test compounds are synthesized on a solid substrate, such as plastic pins or some other surface. The test compounds are reacted with polypeptides of the invention and washed. Bound polypeptides are then detected by methods well known in the art. Purified polypeptides are coated directly onto plates for use in the aforementioned drug screening techniques. In addition, non-neutralizing antibodies may be used to capture the peptide and immobilize it on the solid support.

[1037] This invention also contemplates the use of competitive drug screening assays in which neutralizing antibodies capable of binding polypeptides of the invention specifically compete with a test compound for binding to the polypeptides or fragments thereof. In this manner, the antibodies are used to detect the presence of any peptide which shares one or more antigenic epitopes with a polypeptide of the invention.

### Example 38

### Phosphorylation Assay

[1038] In order to assay for phosphorylation activity of the polypeptides of the invention, a phosphorylation assay as described in U.S. Pat. No. 5,958,405 (which is herein incorporated by reference) is utilized. Briefly, phosphorylation activity may be measured by phosphorylation of a protein substrate using gamma-labeled ³²P-ATP and quantitation of the incorporated radioactivity using a gamma radioisotope counter. The polypeptides of the invention are incubated with the protein substrate, ³²P-ATP, and a kinase buffer. The ³²P incorporated into the substrate is then separated from free ³²P-ATP by electrophoresis, and the incorporated ³²P is counted and compared to a negative control. Radioactivity counts above the negative control are indicative of phosphorylation activity of the polypeptides of the invention.

### Example 39

### Detection of Phosphorylation Activity (Activation) of the Polypeptides of the Invention in the Presence of Polypeptide Ligands

[1039] Methods known in the art or described herein may be used to determine the phosphorylation activity of the polypeptides of the invention. A preferred method of determining phosphorylation activity is by the use of the tyrosine phosphorylation assay as described in U.S. Pat. No. 5,817,471 (incorporated herein by reference).

### Example 40

### Identification of Signal Transduction Proteins that Interact with Polypeptides of the Present Invention

[1040] The purified polypeptides of the invention are research tools for the identification, characterization and purification of additional signal transduction pathway proteins or receptor proteins. Briefly, labeled polypeptides of the invention are useful as reagents for the purification of molecules with which it interacts. In one embodiment of affinity purification, polypeptides of the invention are covalently coupled to a chromatography column. Cell-free extract derived from putative target cells, such as carcinoma tissues, is passed over the column, and molecules with appropriate affinity bind to the polypeptides of the invention. The protein complex is recovered from the column, dissociated, and the recovered molecule subjected to N-terminal protein sequencing. This amino acid sequence is then used to identify the captured molecule or to design degenerate oligonucleotide probes for cloning the relevant gene from an appropriate cDNA library.

### Example 41

### Assay for Phosphatase Activity

[1041] The following assay may be used to assess serine/threonine phosphatase (PTPase) activity of the polypeptides of the invention.

[1042] In order to assay for serine/threonine phosphatase (PTPase) activity, assays can be utilized which are widely known to those skilled in the art. For example, the serine/threonine phosphatase (PSPase) activity is measured using a PSPase assay kit from New England Biolabs, Inc. Myelin basic protein (MyBP), a substrate for PSPase, is phosphorylated on serine and threonine residues with cAMP-dependent Protein Kinase in the presence of [³²P]ATP. Protein serine/threonine phosphatase activity is then determined by measuring the release of inorganic phosphate from 32P-labeled MyBP.

### Example 42

### Interaction of Serine/Threonine Phosphatases with Other Proteins

[1043] The polypeptides of the invention with serine/threonine phosphatase activity as determined in Example 41 are research tools for the identification, characterization and purification of additional interacting proteins or receptor proteins, or other signal transduction pathway proteins. Briefly, labeled polypeptide(s) of the invention is useful as a reagent for the purification of molecules with which it interacts. In one embodiment of affinity purification, polypeptide of the invention is covalently coupled to a chromatography column. Cell-free extract derived from putative target cells, such as neural or liver cells, is passed over the column, and molecules with appropriate affinity bind to the polypeptides of the invention. The polypeptides of the invention-complex is recovered from the column, dissociated, and the recovered molecule subjected to N-terminal protein sequencing. This amino acid sequence is then used to identify the captured molecule or to design degenerate oligonucleotide probes for cloning the relevant gene from an appropriate cDNA library.

### Example 43

### Assaying for Heparanase Activity

[1044] In order to assay for heparanase activity of the polypeptides of the invention, the heparanase assay described by Vlodavsky et al is utilized (Vlodavsky, I., et al., Nat. Med., 5:793-802 (1999)). Briefly, cell lysates, conditioned media or intact cells (1×10⁶ cells per 35-mm dish) are incubated for 18 hrs at 37° C., pH 6.2-6.6, with ³⁵S-labeled ECM or soluble ECM derived peak I proteoglycans. The incubation medium is centrifuged and the supernatant is analyzed by gel filtration on a Sepharose CL-6B column (0.9×30 cm). Fractions are eluted with PBS and their radioactivity is measured. Degradation fragments of heparan sulfate side chains are eluted from Sepharose 6B at 0.5<Kₐᵥ<0.8 (peak II). Each experiment is done at least three times. Degradation fragments corresponding to “peak II,” as described by Vlodavsky et al., is indicative of the activity of the polypeptides of the invention in cleaving heparan sulfate.

### Example 44

### Immobilization of Biomolecules

[1045] This example provides a method for the stabilization of polypeptides of the invention in non-host cell lipid bilayer constucts (see, e.g., Bieri et al., Nature Biotech 17:1105-1108 (1999), hereby incorporated by reference in its entirety herein) which can be adapted for the study of polypeptides of the invention in the various functional assays described above. Briefly, carbohydrate-specific chemistry for biotinylation is used to confine a biotin tag to the extracellular domain of the polypeptides of the invention, thus allowing uniform orientation upon immobilization. A 50 uM solution of polypeptides of the invention in washed membranes is incubated with 20 mM NaIO4 and 1.5 mg/ml (4 mM) BACH or 2 mg/ml (7.5 mM) biotin-hydrazide for 1 hr at room temperature (reaction volume, 150 ul). Then the sample is dialyzed (Pierce Slidealizer Cassett, 10 kDa cutoff; Pierce Chemical Co., Rockford Ill.) at 4 C first for 5 h, exchanging the buffer after each hour, and finally for 12 h against 500 ml buffer R (0.15 M NaCl, 1 mM MgCl2, 10 mM sodium phosphate, pH7). Just before addition into a cuvette, the sample is diluted 1:5 in buffer ROG50 (Buffer R supplemented with 50 mM octylglucoside).

### Example 45

### TAQMAN

[1046] Quantitative PCR (QPCR). Total RNA from cells in culture are extracted by Trizol separation as recommended by the supplier (LifeTechnologies). (Total RNA is treated with DNase I (Life Technologies) to remove any contaminating genomic DNA before reverse transcription.) Total RNA (50 ng) is used in a one-step, 50 ul, RT-QPCR, consisting of Taqman Buffer A (Perkin-Elmer; 50 mM KCl/10 mM Tris, pH 8.3), 5.5 mM MgCl₂, 240 μM each dNTP, 0.4 units RNase inhibitor (Promega), 8% glycerol, 0.012% Tween-20, 0.05% gelatin, 0.3 uM primers, 0.1 uM probe, 0.025 units Amplitaq Gold (Perkin-Elmer) and 2.5 units Superscript II reverse transcriptase (Life Technologies). As a control for genomic contamination, parallel reactions are setup without reverse transcriptase. The relative abundance of (unknown) and 18S RNAs are assessed by using the Applied Biosystems Prism 7700 Sequence Detection System (Livak, K. J., Flood, S. J., Marmaro, J., Giusti, W. & Deetz, K. (1995) PCR Methods Appl. 4, 357-362). Reactions are carried out at 48° C. for 30 min, 95° C. for 10 min, followed by 40 cycles of 95° C. for 15 s, 60° C. for 1 min. Reactions are performed in triplicate.

[1047] Primers (f & r) and FRET probes sets are designed using Primer Express Software (Perkin-Elmer). Probes are labeled at the 5′-end with the reporter dye 6-FAM and on the 3′-end with the quencher dye TAMRA (Biosource International, Camarillo, Calif. or Perkin-Elmer).

### Example 46

### Assays for Metalloproteinase Activity

[1048] Metalloproteinases (EC 3.4.24.-) are peptide hydrolases which use metal ions, such as Zn²⁺, as the catalytic mechanism. Metalloproteinase activity of polypeptides of the present invention can be assayed according to the following methods.

[1049] Proteolysis of Alpha-2-macroglobulin

[1050] To confirm protease activity, purified polypeptides of the invention are mixed with the substrate alpha-2-macroglobulin (0.2 unit/ml; Boehringer Mannheim, Germany) in 1× assay buffer (50 mM HEPES, pH 7.5, 0.2 M NaCl, 10 mM CaCl₂, 25 μM ZnCl₂ and 0.05% Brij-35) and incubated at 37° C. for 1-5 days. Trypsin is used as positive control. Negative controls contain only alpha-2-macroglobulin in assay buffer. The samples are collected and boiled in SDS-PAGE sample buffer containing 5% 2-mercaptoethanol for 5-min, then loaded onto 8% SDS-polyacrylamide gel. After electrophoresis the proteins are visualized by silver staining. Proteolysis is evident by the appearance of lower molecular weight bands as compared to the negative control.

[1051] Inhibition of alpha-2-macroglobulin proteolysis by inhibitors of metalloproteinases Known metalloproteinase inhibitors (metal chelators (EDTA, EGTA, AND HgCl₂), peptide metalloproteinase inhibitors (TIMP-1 and TIMP-2), and commercial small molecule MMP inhibitors) are used to characterize the proteolytic activity of polypeptides of the invention. The three synthetic MMP inhibitors used are: MMP inhibitor I, [IC₅₀=1.0 μM against MMP-1 and MMP-8; IC₅₀=30 μM against MMP-9; IC₅₀=150 μM against MMP-3]; MMP-3 (stromelysin-1) inhibitor I [IC₅₀=5 μM against MMP-3], and MMP-3 inhibitor II [Kᵢ=130 nM against MMP-3]; inhibitors available through Calbiochem, catalog # 444250, 444218, and 444225, respectively). Briefly, different concentrations of the small molecule MMP inhibitors are mixed with purified polypeptides of the invention (50 μg/ml) in 22.9 μl of 1×HEPES buffer (50 mM HEPES, pH 7.5, 0.2 M NaCl, 10 mM CaCl₂, 25 μM ZnCl₂ and 0.05% Brij-35) and incubated at room temperature (24° C.) for 2-hr, then 7.1 μl of substrate alpha-2-macroglobulin (0.2 unit/ml) is added and incubated at 37° C. for 20-hr. The reactions are stopped by adding 4× sample buffer and boiled immediately for 5 minutes. After SDS-PAGE, the protein bands are visualized by silver stain.

[1052] Synthetic Fluorogenic Peptide Substrates Cleavage Assay

[1053] The substrate specificity for polypeptides of the invention with demonstrated metalloproteinase activity can be determined using synthetic fluorogenic peptide substrates (purchased from BACHEM Bioscience Inc). Test substrates include, M-1985, M-2225, M-2105, M-2110, and M-2255. The first four are MMP substrates and the last one is a substrate of tumor necrosis factor-α (TNF-α) converting enzyme (TACE). All the substrates are prepared in 1:1 dimethyl sulfoxide (DMSO) and water. The stock solutions are 50-500 μM. Fluorescent assays are performed by using a Perkin Elmer LS 50B luminescence spectrometer equipped with a constant temperature water bath. The excitation λ is 328 nm and the emission λ is 393 nm. Briefly, the assay is carried out by incubating 176 μl 1×HEPES buffer (0.2 M NaCl, 10 mM CaCl₂, 0.05% Brij-35 and 50 mM HEPES, pH 7.5) with 4 μl of substrate solution (50 μM) at 25° C. for 15 minutes, and then adding 20 μl of a purified polypeptide of the invention into the assay cuvett. The final concentration of substrate is 1 μM. Initial hydrolysis rates are monitored for 30-min.

### Example 47

### Characterization of the cDNA Contained in a Deposited Plasmid

[1054] The size of the cDNA insert contained in a deposited plasmid may be routinely determined using techniques known in the art, such as PCR amplification using synthetic primers hybridizable to the 3′ and 5′ ends of the cDNA sequence. For example, two primers of 17-30 nucleotides derived from each end of the cDNA (i.e., hybridizable to the absolute 5′ nucleotide or the 3′ nucleotide end of the sequence of SEQ ID NO:X, respectively) are synthesized and used to amplify the cDNA using the deposited cDNA plasmid as a template. The polymerase chain reaction is carried out under routine conditions, for instance, in 25 ul of reaction mixture with 0.5 ug of the above cDNA template. A convenient reaction mixture is 1.5-5 mM MgCl₂, 0.01% (w/v) gelatin, 20 uM each of dATP, dCTP, dGTP, dTTP, 25 pmol of each primer and 0.25 Unit of Taq polymerase. Thirty five cycles of PCR (denaturation at 94 degree C. for 1 min; annealing at 55 degree C. for 1 min; elongation at 72 degree C. for 1 min) are performed with a Perkin-Elmer Cetus automated thermal cycler. The amplified product is analyzed by agarose gel electrophoresis. The PCR product is verified to be the selected sequence by subcloning and sequencing the DNA product. It will be clear that the invention may be practiced otherwise than as particularly described in the foregoing description and examples. Numerous modifications and variations of the present invention are possible in light of the above teachings and, therefore, are within the scope of the appended claims.

Incorporation by Reference

[1055] The entire disclosure of each document cited (including patents, patent applications, journal articles, abstracts, laboratory manuals, books, or other disclosures) in the Background of the Invention, Detailed Description, and Examples is hereby incorporated herein by reference. In addition, the sequence listing submitted herewith is incorporated herein by reference in its entirety. The specification and sequence listing of each of the following U.S. and PCT applications are herein incorporated by reference in their entirety: U.S. Appln. No. 60/040,162 filed on 7-Mar.-1997, U.S. Appln. No. 60/043,576 filed on 11-Apr.-1997, U.S. Appln. No. 60/047,601 filed on 23-May-1997, U.S. Appln. No. 60/056,845 filed on 22-Aug.-1997, U.S. Appln. No. 60/043,580 filed on 11-Apr.-1997, U.S. Appln. No. 60/047,599 filed on 23-May-1997, U.S. Appln. No. 60/056,664 filed on 22-Aug.-1997, U.S. Appln. No. 60/043,314 filed on 11-Apr.-1997, U.S. Appln. No. 60/047,632 filed on 23-May-1997, U.S. Appln. No. 60/056,892 filed on 22-Aug.-1997, U.S. Appln. No. 60/043,568 filed on 11-Apr.-1997, U.S. Appln. No. 60/047,595 filed on 23-May-1997, U.S. Appln. No. 60/056,632 filed on 22-Aug.-1997, U.S. Appln. No. 60/043,578 filed on 11-Apr.-1997, U.S. Appln. No. 60/040,333 filed on 7-Mar.-1997, U.S. Appln. No. 60/043,670 filed on 11-Apr.-1997, U.S. Appln. No. 60/047,596 filed on 23-May-1997, U.S. Appln. No. 60/056,864 filed on 22-Aug.-1997, U.S. Appln. No. 60/043,674 filed on 11-Apr.-1997, U.S. Appln. No. 60/047,612 filed on 23-May-1997, U.S. Appln. No. 60/056,631 filed on 22-Aug.-1997, U.S. Appln. No. 60/043,569 filed on 11-Apr.-1997, U.S. Appln. No. 60/047,588 filed on 23-May-1997, U.S. Appln. No. 60/056,876 filed on 22-Aug.-1997, U.S. Appln. No. 60/043,671 filed on 11-Apr.-1997, U.S. Appln. No. 60/043,311 filed on 11-Apr.-1997, U.S. Appln. No. 60/038,621 filed on 7-Mar.-1997, U.S. Appln. No. 60/043,672 filed on 11-Apr.-1997, U.S. Appln. No. 60/047,613 filed on 23-May-1997, U.S. Appln. No. 60/056,636 filed on 22-Aug.-1997, U.S. Appln. No. 60/043,669 filed on 11-Apr.-1997, U.S. Appln. No. 60/047,582 filed on 23-May-1997, U.S. Appln. No. 60/056,910 filed on 22-Aug.-1997, U.S. Appln. No. 60/043,315 filed on 11-Apr.-1997, U.S. Appln. No. 60/047,598 filed on 23-May-1997, U.S. Appln. No. 60/056,874 filed on 22-Aug.-1997, U.S. Appln. No. 60/043,312 filed on 11-Apr.-1997, U.S. Appln. No. 60/047,585 filed on 23-May-1997, U.S. Appln. No. 60/056,881 filed on 22-Aug.-1997, U.S. Appln. No. 60/043,313 filed on 11-Apr.-1997, U.S. Appln. No. 60/047,586 filed on 23-May-1997, U.S. Appln. No. 60/056,909 filed on 22-Aug.-1997, U.S. Appln. No. 60/040,161 filed on 7-Mar.-1997, U.S. Appln. No. 60/047,587 filed on 23-May-1997, U.S. Appln. No. 60/056,879 filed on 22-Aug.-1997, U.S. Appln. No. 60/047,500 filed on 23-May-1997, U.S. Appln. No. 60/056,880 filed on 22-Aug.-1997, U.S. Appln. No. 60/047,584 filed on 23-May-1997, U.S. Appln. No. 60/056,894 filed on 22-Aug.-1997, U.S. Appln. No. 60/047,492 filed on 23-May-1997, U.S. Appln. No. 60/056,911 filed on 22-Aug.-1997, U.S. Appln. No. 60/040,626 filed on 7-Mar.-1997, U.S. Appln. No. 60/047,503 filed on 23-May-1997, U.S. Appln. No. 60/056,903 filed on 22-Aug.-1997, U.S. Appln. No. 60/047,501 filed on 23-May-1997, U.S. Appln. No. 60/056,637 filed on 22-Aug.-1997, U.S. Appln. No. 60/047,590 filed on 23-May-1997, U.S. Appln. No. 60/056,875 filed on 22-Aug.-1997, U.S. Appln. No. 60/047,581 filed on 23-May-1997, U.S. Appln. No. 60/056,882 filed on 22-Aug.-1997, U.S. Appln. No. 60/047,592 filed on 23-May-1997, U.S. Appln. No. 60/056,888 filed on 22-Aug.-1997, U.S. Appln. No. 60/040,334 filed on 7-Mar.-1997, U.S. Appln. No. 60/047,618 filed on 23-May-1997, U.S. Appln. No. 60/056,872 filed on 22-Aug.-1997, U.S. Appln. No. 60/047,617 filed on 23-May-1997, U.S. Appln. No. 60/056,662 filed on 22-Aug.-1997, U.S. Appln. No. 60/047,589 filed on 23-May-1997, U.S. Appln. No. 60/056,862 filed on 22-Aug.-1997, U.S. Appln. No. 60/047,594 filed on 23-May-1997, U.S. Appln. No. 60/056,884 filed on 22-Aug.-1997, U.S. Appln. No. 60/047,583 filed on 23-May-1997, U.S. Appln. No. 60/056,878 filed on 22-Aug.-1997, U.S. Appln. No. 60/040,336 filed on 7-Mar.-1997, U.S. Appln. No. 60/047,502 filed on 23-May-1997, U.S. Appln. No. 60/056,893 filed on 22-Aug.-1997, U.S. Appln. No. 60/047,633 filed on 23-May-1997, U.S. Appln. No. 60/056,630 filed on 22-Aug.-1997, U.S. Appln. No. 60/047,593 filed on 23-May-1997, U.S. Appln. No. 60/056,887 filed on 22-Aug.-1997, U.S. Appln. No. 60/040,163 filed on 7-Mar.-1997, U.S. Appln. No. 60/047,597 filed on 23-May-1997, U.S. Appln. No. 60/056,889 filed on 22-Aug.-1997, U.S. Appln. No. 60/047,615 filed on 23-May-1997, U.S. Appln. No. 60/056,877 filed on 22-Aug.-1997, U.S. Appln. No. 60/047,600 filed on 23-May-1997, U.S. Appln. No. 60/056,886 filed on 22-Aug.-1997, U.S. Appln. No. 60/047,614 filed on 23-May-1997, U.S. Appln. No. 60/056,908 filed on 22-Aug.-1997, U.S. Appln. No. 60/040,710 filed on 14-Mar.-1997, U.S. Appln. No. 60/050,934 filed on 30-May-1997, U.S. Appln. No. 60/048,100 filed on 30-May-1997, U.S. Appln. No. 60/040,762 filed on 14-Mar.-1997, U.S. Appln. No. 60/048,357 filed on 30-May-1997, U.S. Appln. No. 60/048,189 filed on 30-May-1997, U.S. Appln. No. 60/041,277 filed on 21-Mar.-1997, U.S. Appln. No. 60/048,188 filed on 30-May-1997, U.S. Appln. No. 60/048,094 filed on 30-May-1997, U.S. Appln. No. 60/048,350 filed on 30-May-1997, U.S. Appln. No. 60/048,135 filed on 30-May-1997, U.S. Appln. No. 60/042,344 filed on 21-Mar.-1997, U.S. Appln. No. 60/048,187 filed on 30-May-1997, U.S. Appln. No. 60/048,099 filed on 30-May-1997, U.S. Appln. No. 60/050,937 filed on 30-May-1997, U.S. Appln. No. 60/048,352 filed on 30-May-1997, U.S. Appln. No. 60/041,276 filed on 21-Mar.-1997, U.S. Appln. No. 60/048,069 filed on 30-May-1997, U.S. Appln. No. 60/048,131 filed on 30-May-1997, U.S. Appln. No. 60/048,186 filed on 30-May-1997, U.S. Appln. No. 60/048,095 filed on 30-May-1997, U.S. Appln. No. 60/041,281 filed on 21-Mar.-1997, U.S. Appln. No. 60/048,355 filed on 30-May-1997, U.S. Appln. No. 60/048,096 filed on 30-May-1997, U.S. Appln. No. 60/048,351 filed on 30-May-1997, U.S. Appln. No. 60/048,154 filed on 30-May-1997, U.S. Appln. No. 60/048,160 filed on 30-May-1997, U.S. Appln. No. 60/042,825 filed on 8-Apr.-1997, U.S. Appln. No. 60/048,070 filed on 30-May-1997, U.S. Appln. No. 60/042,727 filed on 8-Apr.-1997, U.S. Appln. No. 60/048,068 filed on 30-May-1997, U.S. Appln. No. 60/042,726 filed on 8-Apr.-1997, U.S. Appln. No. 60/048,184 filed on 30-May-1997, U.S. Appln. No. 60/042,728 filed on 8-Apr.-1997, U.S. Appln. No. 60/042,754 filed on 8-Apr.-1997, U.S. Appln. No. 60/048,190 filed on 30-May-1997, U.S. Appln. No. 60/044,039 filed on 30-May-1997, U.S. Appln. No. 60/048,093 filed on 30-May-1997, U.S. Appln. No. 60/048,885 filed on 6-Jun.-1997, U.S. Appln. No. 60/057,645 filed on 5-Sep.-1997, U.S. Appln. No. 60/049,375 filed on 6-Jun.-1997, U.S. Appln. No. 60/057,642 filed on 5-Sep.-1997, U.S. Appln. No. 60/048,881 filed on 6-Jun.-1997, U.S. Appln. No. 60/057,668 filed on 5-Sep.-1997, U.S. Appln. No. 60/048,880 filed on 6-Jun.-1997, U.S. Appln. No. 60/057,635 filed on 5-Sep.-1997, U.S. Appln. No. 60/048,896 filed on 6-Jun.-1997, U.S. Appln. No. 60/057,627 filed on 5-Sep.-1997, U.S. Appln. No. 60/049,020 filed on 6-Jun.-1997, U.S. Appln. No. 60/057,667 filed on 5-Sep.-1997, U.S. Appln. No. 60/048,876 filed on 6-Jun.-1997, U.S. Appln. No. 60/057,666 filed on 5-Sep.-1997, U.S. Appln. No. 60/048,895 filed on 6-Jun.-1997, U.S. Appln. No. 60/057,764 filed on 5-Sep.-1997, U.S. Appln. No. 60/048,884 filed on 6-Jun.-1997, U.S. Appln. No. 60/057,643 filed on 5-Sep.-1997, U.S. Appln. No. 60/048,894 filed on 6-Jun.-1997, U.S. Appln. No. 60/057,769 filed on 5-Sep.-1997, U.S. Appln. No. 60/048,971 filed on 6-Jun.-1997, U.S. Appln. No. 60/057,763 filed on 5-Sep.-1997, U.S. Appln. No. 60/048,964 filed on 6-Jun.-1997, U.S. Appln. No. 60/057,650 filed on 5-Sep.-1997, U.S. Appln. No. 60/048,882 filed on 6-Jun.-1997, U.S. Appln. No. 60/057,584 filed on 5-Sep.-1997, U.S. Appln. No. 60/048,899 filed on 6-Jun.-1997, U.S. Appln. No. 60/057,647 filed on 5-Sep.-1997, U.S. Appln. No. 60/048,893 filed on 6-Jun.-1997, U.S. Appln. No. 60/057,661 filed on 5-Sep.-1997, U.S. Appln. No. 60/048,900 filed on 6-Jun.-1997, U.S. Appln. No. 60/057,662 filed on 5-Sep.-1997, U.S. Appln. No. 60/048,901 filed on 6-Jun.-1997, U.S. Appln. No. 60/057,646 filed on 5-Sep.-1997, U.S. Appln. No. 60/048,892 filed on 6-Jun.-1997, U.S. Appln. No. 60/057,654 filed on 5-Sep.-1997, U.S. Appln. No. 60/048,915 filed on 6-Jun.-1997, U.S. Appln. No. 60/057,651 filed on 5-Sep.-1997, U.S. Appln. No. 60/049,019 filed on 6-Jun.-1997, U.S. Appln. No. 60/057,644 filed on 5-Sep.-1997, U.S. Appln. No. 60/048,970 filed on 6-Jun.-1997, U.S. Appln. No. 60/057,765 filed on 5-Sep.-1997, U.S. Appln. No. 60/048,972 filed on 6-Jun.-1997, U.S. Appln. No. 60/057,762 filed on 5-Sep.-1997, U.S. Appln. No. 60/048,916 filed on 6-Jun.-1997, U.S. Appln. No. 60/057,775 filed on 5-Sep.-1997, U.S. Appln. No. 60/049,373 filed on 6-Jun.-1997, U.S. Appln. No. 60/057,648 filed on 5-Sep.-1997, U.S. Appln. No. 60/048,875 filed on 6-Jun.-1997, U.S. Appln. No. 60/057,774 filed on 5-Sep.-1997, U.S. Appln. No. 60/049,374 filed on 6-Jun.-1997, U.S. Appln. No. 60/057,649 filed on 5-Sep.-1997, U.S. Appln. No. 60/048,917 filed on 6-Jun.-1997, U.S. Appln. No. 60/057,770 filed on 5-Sep.-1997, U.S. Appln. No. 60/048,949 filed on 6-Jun.-1997, U.S. Appln. No. 60/057,771 filed on 5-Sep.-1997, U.S. Appln. No. 60/048,974 filed on 6-Jun.-1997, U.S. Appln. No. 60/057,761 filed on 5-Sep.-1997, U.S. Appln. No. 60/048,883 filed on 6-Jun.-1997, U.S. Appln. No. 60/057,760 filed on 5-Sep.-1997, U.S. Appln. No. 60/048,897 filed on 6-Jun.-1997, U.S. Appln. No. 60/057,776 filed on 5-Sep.-1997, U.S. Appln. No. 60/048,898 filed on 6-Jun.-1997, U.S. Appln. No. 60/057,778 filed on 5-Sep.-1997, U.S. Appln. No. 60/048,962 filed on 6-Jun.-1997, U.S. Appln. No. 60/057,629 filed on 5-Sep.-1997, U.S. Appln. No. 60/048,963 filed on 6-Jun.-1997, U.S. Appln. No. 60/057,628 filed on 5-Sep.-1997, U.S. Appln. No. 60/048,877 filed on 6-Jun.-1997, U.S. Appln. No. 60/057,777 filed on 5-Sep.-1997, U.S. Appln. No. 60/048,878 filed on 6-Jun.-1997, U.S. Appln. No. 60/057,634 filed on 5-Sep.-1997, U.S. Appln. No. 60/049,608 filed on 13-Jun.-1997, U.S. Appln. No. 60/058,669 filed on 12-Sep.-1997, U.S. Appln. No. 60/049,566 filed on 13-Jun.-1997, U.S. Appln. No. 60/058,668 filed on 12-Sep.-1997, U.S. Appln. No. 60/052,989 filed on 13-Jun.-1997, U.S. Appln. No. 60/058,750 filed on 12-Sep.-1997, U.S. Appln. No. 60/049,607 filed on 13-Jun.-1997, U.S. Appln. No. 60/058,665 filed on 12-Sep.-1997, U.S. Appln. No. 60/049,611 filed on 13-Jun.-1997, U.S. Appln. No. 60/058,971 filed on 12-Sep.-1997, U.S. Appln. No. 60/050,901 filed on 13-Jun.-1997, U.S. Appln. No. 60/058,972 filed on 12-Sep.-1997, U.S. Appln. No. 60/049,609 filed on 13-Jun.-1997, U.S. Appln. No. 60/058,975 filed on 12-Sep.-1997, U.S. Appln. No. 60/048,356 filed on 30-May-1997, U.S. Appln. No. 60/056,296 filed on 29-Aug.-1997, U.S. Appln. No. 60/048,101 filed on 30-May-1997, U.S. Appln. No. 60/056,293 filed on 29-Aug.-1997, U.S. Appln. No. 60/050,935 filed on 30-May-1997, U.S. Appln. No. 60/056,250 filed on 29-Aug.-1997, U.S. Appln. No. 60/049,610 filed on 13-Jun.-1997, U.S. Appln. No. 60/061,060 filed on 2-Oct.-1997, U.S. Appln. No. 60/049,606 filed on 13-Jun.-1997, U.S. Appln. No. 60/060,841 filed on 2-Oct.-1997, U.S. Appln. No. 60/049,550 filed on 13-Jun.-1997, U.S. Appln. No. 60/060,834 filed on 2-Oct.-1997, U.S. Appln. No. 60/049,549 filed on 13-Jun.-1997, U.S. Appln. No. 60/060,865 filed on 2-Oct.-1997, U.S. Appln. No. 60/049,548 filed on 13-Jun.-1997, U.S. Appln. No. 60/060,844 filed on 2-Oct.-1997, U.S. Appln. No. 60/049,547 filed on 13-Jun.-1997, U.S. Appln. No. 60/061,059 filed on 2-Oct.-1997, U.S. Appln. No. 60/051,381 filed on 1-Jul.-1997, U.S. Appln. No. 60/058,598 filed on 12-Sep.-1997, U.S. Appln. No. 60/051,480 filed on 1-Jul.-1997, U.S. Appln. No. 60/058,663 filed on 12-Sep.-1997, U.S. Appln. No. 60/051,926 filed on 8-Jul.-1997, U.S. Appln. No. 60/058,785 filed on 12-Sep.-1997, U.S. Appln. No. 60/052,793 filed on 8-Jul.-1997, U.S. Appln. No. 60/058,664 filed on 12-Sep.-1997, U.S. Appln. No. 60/051,925 filed on 8-Jul.-1997, U.S. Appln. No. 60/058,660 filed on 12-Sep.-1997, U.S. Appln. No. 60/051,929 filed on 8-Jul.-1997, U.S. Appln. No. 60/058,661 filed on 12-Sep.-1997, U.S. Appln. No. 60/052,803 filed on 8-Jul.-1997, U.S. Appln. No. 60/055,722 filed on 18-Aug.-1997, U.S. Appln. No. 60/052,732 filed on 8-Jul.-1997, U.S. Appln. No. 60/055,723 filed on 18-Aug.-1997, U.S. Appln. No. 60/051,932 filed on 8-Jul.-1997, U.S. Appln. No. 60/055,948 filed on 18-Aug.-1997, U.S. Appln. No. 60/051,931 filed on 8-Jul.-1997, U.S. Appln. No. 60/055,949 filed on 18-Aug.-1997, U.S. Appln. No. 60/051,916 filed on 8-Jul.-1997, U.S. Appln. No. 60/055,953 filed on 18-Aug.-1997, U.S. Appln. No. 60/051,930 filed on 8-Jul.-1997, U.S. Appln. No. 60/055,950 filed on 18-Aug.-1997, U.S. Appln. No. 60/051,918 filed on 8-Jul.-1997, U.S. Appln. No. 60/055,947 filed on 18-Aug.-1997, U.S. Appln. No. 60/051,920 filed on 8-Jul.-1997, U.S. Appln. No. 60/055,964 filed on 18-Aug.-1997, U.S. Appln. No. 60/052,733 filed on 8-Jul.-1997, U.S. Appln. No. 60/056,360 filed on 18-Aug.-1997, U.S. Appln. No. 60/052,795 filed on 8-Jul.-1997, U.S. Appln. No. 60/055,684 filed on 18-Aug.-1997, U.S. Appln. No. 60/051,919 filed on 8-Jul.-1997, U.S. Appln. No. 60/055,984 filed on 18-Aug.-1997, U.S. Appln. No. 60/051,928 filed on 8-Jul.-1997, U.S. Appln. No. 60/055,954 filed on 18-Aug.-1997, U.S. Appln. No. 60/052,870 filed on 16-Jul.-1997, U.S. Appln. No. 60/055,952 filed on 18-Aug.-1997, U.S. Appln. No. 60/052,871 filed on 16-Jul.-1997, U.S. Appln. No. 60/055,725 filed on 18-Aug.-1997, U.S. Appln. No. 60/052,872 filed on 16-Jul.-1997, U.S. Appln. No. 60/056,359 filed on 18-Aug.-1997, U.S. Appln. No. 60/052,661 filed on 16-Jul.-1997, U.S. Appln. No. 60/055,985 filed on 18-Aug.-1997, U.S. Appln. No. 60/052,874 filed on 16-Jul.-1997, U.S. Appln. No. 60/055,724 filed on 18-Aug.-1997, U.S. Appln. No. 60/052,873 filed on 16-Jul.-1997, U.S. Appln. No. 60/055,726 filed on 18-Aug.-1997, U.S. Appln. No. 60/052,875 filed on 16-Jul.-1997, U.S. Appln. No. 60/056,361 filed on 18-Aug.-1997, U.S. Appln. No. 60/053,440 filed on 22-Jul.-1997, U.S. Appln. No. 60/055,989 filed on 18-Aug.-1997, U.S. Appln. No. 60/053,441 filed on 22-Jul.-1997, U.S. Appln. No. 60/055,946 filed on 18-Aug.-1997, U.S. Appln. No. 60/053,442 filed on 22-Jul.-1997, U.S. Appln. No. 60/055,683 filed on 18-Aug.-1997, U.S. Appln. No. 60/054,212 filed on 30-Jul.-1997, U.S. Appln. No. 60/055,968 filed on 18-Aug.-1997, U.S. Appln. No. 60/054,209 filed on 30-Jul.-1997, U.S. Appln. No. 60/055,972 filed on 18-Aug.-1997, U.S. Appln. No. 60/054,234 filed on 30-Jul.-1997, U.S. Appln. No. 60/055,969 filed on 18-Aug.-1997, U.S. Appln. No. 60/055,386 filed on 5-Aug.-1997, U.S. Appln. No. 60/055,986 filed on 18-Aug.-1997, U.S. Appln. No. 60/054,807 filed on 5-Aug.-1997, U.S. Appln. No. 60/055,970 filed on 18-Aug.-1997, U.S. Appln. No. 60/054,215 filed on 30-Jul.-1997, U.S. Appln. No. 60/056,543 filed on 19-Aug.-1997, U.S. Appln. No. 60/054,218 filed on 30-Jul.-1997, U.S. Appln. No. 60/056,561 filed on 19-Aug.-1997, U.S. Appln. No. 60/054,214 filed on 30-Jul.-1997, U.S. Appln. No. 60/056,534 filed on 19-Aug.-1997, U.S. Appln. No. 60/054,236 filed on 30-Jul.-1997, U.S. Appln. No. 60/056,729 filed on 19-Aug.-1997, U.S. Appln. No. 60/054,213 filed on 30-Jul.-1997, U.S. Appln. No. 60/056,727 filed on 19-Aug.-1997, U.S. Appln. No. 60/054,211 filed on 30-Jul.-1997, U.S. Appln. No. 60/056,554 filed on 19-Aug.-1997, U.S. Appln. No. 60/054,217 filed on 30-Jul.-1997, U.S. Appln. No. 60/056,730 filed on 19-Aug.-1997, U.S. Appln. No. 60/055,312 filed on 5-Aug.-1997, U.S. Appln. No. 60/056,563 filed on 19-Aug.-1997, U.S. Appln. No. 60/055,309 filed on 5-Aug.-1997, U.S. Appln. No. 60/056,557 filed on 19-Aug.-1997, U.S. Appln. No. 60/055,310 filed on 5-Aug.-1997, U.S. Appln. No. 60/056,371 filed on 19-Aug.-1997, U.S. Appln. No. 60/054,798 filed on 5-Aug.-1997, U.S. Appln. No. 60/056,732 filed on 19-Aug.-1997, U.S. Appln. No. 60/056,369 filed on 19-Aug.-1997, U.S. Appln. No. 60/056,535 filed on 19-Aug.-1997, U.S. Appln. No. 60/056,556 filed on 19-Aug.-1997, U.S. Appln. No. 60/056,555 filed on 19-Aug.-1997, U.S. Appln. No. 60/054,806 filed on 5-Aug.-1997, U.S. Appln. No. 60/056,366 filed on 19-Aug.-1997, U.S. Appln. No. 60/054,809 filed on 5-Aug.-1997, U.S. Appln. No. 60/056,364 filed on 19-Aug.-1997, U.S. Appln. No. 60/054,804 filed on 5-Aug.-1997, U.S. Appln. No. 60/056,370 filed on 19-Aug.-1997, U.S. Appln. No. 60/054,803 filed on 5-Aug.-1997, U.S. Appln. No. 60/056,731 filed on 19-Aug.-1997, U.S. Appln. No. 60/055,311 filed on 5-Aug.-1997, U.S. Appln. No. 60/056,365 filed on 19-Aug.-1997, U.S. Appln. No. 60/054,808 filed on 5-Aug.-1997, U.S. Appln. No. 60/056,367 filed on 19-Aug.-1997, U.S. Appln. No. 60/056,726 filed on 19-Aug.-1997, U.S. Appln. No. 60/056,368 filed on 19-Aug.-1997, U.S. Appln. No. 60/056,728 filed on 19-Aug.-1997, U.S. Appln. No. 60/056,628 filed on 19-Aug.-1997, U.S. Appln. No. 60/056,629 filed on 19-Aug.-1997, U.S. Appln. No. 60/056,270 filed on 29-Aug.-1997, U.S. Appln. No. 60/056,271 filed on 29-Aug.-1997, U.S. Appln. No. 60/056,247 filed on 29-Aug.-1997, U.S. Appln. No. 60/056,073 filed on 29-Aug.-1997, U.S. Appln. No. 60/057,669 filed on 5-Sep.-1997, U.S. Appln. No. 60/057,663 filed on 5-Sep.-1997, U.S. Appln. No. 60/057,626 filed on 5-Sep.-1997, U.S. Appln. No. 60/058,666 filed on 12-Sep.-1997, U.S. Appln. No. 60/058,973 filed on 12-Sep.-1997, U.S. Appln. No. 60/058,974 filed on 12-Sep.-1997, U.S. Appln. No. 60/058,667 filed on 12-Sep.-1997, U.S. Appln. No. 60/060,837 filed on 2-Oct.-1997, U.S. Appln. No. 60/060,862 filed on 2-Oct.-1997, U.S. Appln. No. 60/060,839 filed on 2-Oct.-1997, U.S. Appln. No. 60/060,866 filed on 2-Oct.-1997, U.S. Appln. No. 60/060,843 filed on 2-Oct.-1997, U.S. Appln. No. 60/060,836 filed on 2-Oct.-1997, U.S. Appln. No. 60/060,838 filed on 2-Oct.-1997, U.S. Appln. No. 60/060,874 filed on 2-Oct.-1997, U.S. Appln. No. 60/060,833 filed on 2-Oct.-1997, U.S. Appln. No. 60/060,884 filed on 2-Oct.-1997, U.S. Appln. No. 60/060,880 filed on 2-Oct.-1997, U.S. Appln. No. 60/061,463 filed on 9-Oct.-1997, U.S. Appln. No. 60/061,529 filed on 9-Oct.-1997, U.S. Appln. No. 60/071,498 filed on 9-Oct.-1997, U.S. Appln. No. 60/061,527 filed on 9-Oct.-1997, U.S. Appln. No. 60/061,536 filed on 9-Oct.-1997, U.S. Appln. No. 60/061,532 filed on 9-Oct.-1997, U.S. Appln. No. 60/063,099 filed on 24-Oct.-1997, U.S. Appln. No. 60/063,088 filed on 24-Oct.-1997, U.S. Appln. No. 60/063,100 filed on 24-Oct.-1997, U.S. Appln. No. 60/063,387 filed on 24-Oct.-1997, U.S. Appln. No. 60/063,148 filed on 24-Oct.-1997, U.S. Appln. No. 60/063,386 filed on 24-Oct.-1997, U.S. Appln. No. 60/062,784 filed on 24-Oct.-1997, U.S. Appln. No. 60/063,091 filed on 24-Oct.-1997, U.S. Appln. No. 60/063,090 filed on 24-Oct.-1997, U.S. Appln. No. 60/063,089 filed on 24-Oct.-1997, U.S. Appln. No. 60/063,092 filed on 24-Oct.-1997, U.S. Appln. No. 60/063,111 filed on 24-Oct.-1997, U.S. Appln. No. 60/063,101 filed on 24-Oct.-1997, U.S. Appln. No. 60/063,109 filed on 24-Oct.-1997, U.S. Appln. No. 60/063,110 filed on 24-Oct.-1997, U.S. Appln. No. 60/063,098 filed on 24-Oct.-1997, U.S. Appln. No. 60/063,097 filed on 24-Oct.-1997, U.S. Appln. No. 60/064,911 filed on 7-Nov.-1997, U.S. Appln. No. 60/064,912 filed on 7-Nov.-1997, U.S. Appln. No. 60/064,983 filed on 7-Nov.-1997, U.S. Appln. No. 60/064,900 filed on 7-Nov.-1997, U.S. Appln. No. 60/064,988 filed on 7-Nov.-1997, U.S. Appln. No. 60/064,987 filed on 7-Nov.-1997, U.S. Appln. No. 60/064,908 filed on 7-Nov.-1997, U.S. Appln. No. 60/064,984 filed on 7-Nov.-1997, U.S. Appln. No. 60/064,985 filed on 7-Nov.-1997, U.S. Appln. No. 60/066,094 filed on 17-Nov.-1997, U.S. Appln. No. 60/066,100 filed on 17-Nov.-1997, U.S. Appln. No. 60/066,089 filed on 17-Nov.-1997, U.S. Appln. No. 60/066,095 filed on 17-Nov.-1997, U.S. Appln. No. 60/066,090 filed on 17-Nov.-1997, U.S. Appln. No. 60/068,006 filed on 18-Dec.-1997, U.S. Appln. No. 60/068,057 filed on 18-Dec.-1997, U.S. Appln. No. 60/068,007 filed on 18-Dec.-1997, U.S. Appln. No. 60/068,008 filed on 18-Dec.-1997, U.S. Appln. No. 60/068,054 filed on 18-Dec.-1997, U.S. Appln. No. 60/068,064 filed on 18-Dec.-1997, U.S. Appln. No. 60/068,053 filed on 18-Dec.-1997, U.S. Appln. No. 60/070,923 filed on 18-Dec.-1997, U.S. Appln. No. 60/068,365 filed on 19-Dec.-1997, U.S. Appln. No. 60/068,169 filed on 19-Dec.-1997, U.S. Appln. No. 60/068,367 filed on 19-Dec.-1997, U.S. Appln. No. 60/068,369 filed on 19-Dec.-1997, U.S. Appln. No. 60/068,368 filed on 19-Dec.-1997, U.S. Appln. No. 60/070,657 filed on 7-Jan.-1998, U.S. Appln. No. 60/070,692 filed on 7-Jan.-1998, U.S. Appln. No. 60/070,704 filed on 7-Jan.-1998, U.S. Appln. No. 60/070,658 filed on 7-Jan.-1998, U.S. Appln. No. 60/073,160 filed on 30-Jan.-1998, U.S. Appln. No. 60/073,159 filed on 30-Jan.-1998, U.S. Appln. No. 60/073,165 filed on 30-Jan.-1998, U.S. Appln. No. 60/073,164 filed on 30-Jan.-1998, U.S. Appln. No. 60/073,167 filed on 30-Jan.-1998, U.S. Appln. No. 60/073,162 filed on 30-Jan.-1998, U.S. Appln. No. 60/073,161 filed on 30-Jan.-1998, U.S. Appln. No. 60/073,170 filed on 30-Jan.-1998, U.S. Appln. No. 60/074,141 filed on 9-Feb.-1998, U.S. Appln. No. 60/074,341 filed on 9-Feb.-1998, U.S. Appln. No. 60/074,037 filed on 9-Feb.-1998, U.S. Appln. No. 60/074,157 filed on 9-Feb.-1998, U.S. Appln. No. 60/074,118 filed on 9-Feb.-1998, U.S. Appln. No. 60/076,051 filed on 26-Feb.-1998, U.S. Appln. No. 60/076,053 filed on 26-Feb.-1998, U.S. Appln. No. 60/076,054 filed on 26-Feb.-1998, U.S. Appln. No. 60/076,052 filed on 26-Feb.-1998, U.S. Appln. No. 60/076,057 filed on 26-Feb.-1998, U.S. Appln. No. 60/077,714 filed on 12-Mar.-1998, U.S. Appln. No. 60/077,687 filed on 12-Mar.-1998, U.S. Appln. No. 60/077,686 filed on 12-Mar.-1998, U.S. Appln. No. 60/077,696 filed on 12-Mar.-1998, U.S. Appln. No. 60/078,566 filed on 19-Mar.-1998, U.S. Appln. No. 60/078,574 filed on 19-Mar.-1998, U.S. Appln. No. 60/078,576 filed on 19-Mar.-1998, U.S. Appln. No. 60/078,579 filed on 19-Mar.-1998, U.S. Appln. No. 60/078,563 filed on 19-Mar.-1998, U.S. Appln. No. 60/078,573 filed on 19-Mar.-1998, U.S. Appln. No. 60/078,578 filed on 19-Mar.-1998, U.S. Appln. No. 60/078,581 filed on 19-Mar.-1998, U.S. Appln. No. 60/078,577 filed on 19-Mar.-1998, U.S. Appln. No. 60/080,314 filed on 1-Apr.-1998, U.S. Appln. No. 60/080,312 filed on 1-Apr.-1998, U.S. Appln. No. 60/080,313 filed on 1-Apr.-1998, U.S. Appln. No. 60/085,180 filed on 12-May-1998, U.S. Appln. No. 60/085,105 filed on 12-May-1998, U.S. Appln. No. 60/085,094 filed on 12-May-1998, U.S. Appln. No. 60/085,093 filed on 12-May-1998, U.S. Appln. No. 60/085,924 filed on 18-May-1998, U.S. Appln. No. 60/085,906 filed on 18-May-1998, U.S. Appln. No. 60/085,927 filed on 18-May-1998, U.S. Appln. No. 60/085,920 filed on 18-May-1998, U.S. Appln. No. 60/085,928 filed on 18-May-1998, U.S. Appln. No. 60/085,925 filed on 18-May-1998, U.S. Appln. No. 60/085,921 filed on 18-May-1998, U.S. Appln. No. 60/085,923 filed on 18-May-1998, U.S. Appln. No. 60/085,922 filed on 18-May-1998, U.S. Appln. No. 60/090,112 filed on 22-Jun.-1998, U.S. Appln. No. 60/089,508 filed on 16-Jun.-1998, U.S. Appln. No. 60/089,507 filed on 16-Jun.-1998, U.S. Appln. No. 60/089,510 filed on 16-Jun.-1998, U.S. Appln. No. 60/089,509 filed on 16-Jun.-1998, U.S. Appln. No. 60/090,113 filed on 22-Jun.-1998, U.S. Appln. No. 60/092,956 filed on 15-Jul.-1998, U.S. Appln. No. 60/092,921 filed on 15-Jul.-1998, U.S. Appln. No. 60/092,922 filed on 15-Jul.-1998, U.S. Appln. No. 60/094,657 filed on 30-Jul.-1998, U.S. Appln. No. 60/095,486 filed on 5-Aug.-1998, U.S. Appln. No. 60/096,319 filed on 12-Aug.-1998, U.S. Appln. No. 60/095,455 filed on 6-Aug.-1998, U.S. Appln. No. 60/095,454 filed on 6-Aug.-1998, U.S. Appln. No. 60/097,917 filed on 25-Aug.-1998, U.S. Appln. No. 60/098,634 filed on 31-Aug.-1998, U.S. Appln. No. 60/101,546 filed on 23-Sep.-1998, U.S. Appln. No. 60/102,895 filed on 2-Oct.-1998, U.S. Appln. No. 60/108,207 filed on 12-Nov.-1998, U.S. Appln. No. 60/113,006 filed on 18-Dec.-1998, U.S. Appln. No. 60/112,809 filed on 17-Dec.-1998, U.S. Appln. No. 60/116,330 filed on 19-Jan.-1999, U.S. Appln. No. 60/119,468 filed on 10-Feb.-1999, U.S. Appln. No. 60/125,055 filed on 18-Mar.-1999, U.S. Appln. No. 60/128,693 filed on 9-Apr.-1999, U.S. Appln. No. 60/130,991 filed on 26-Apr.-1999, U.S. Appln. No. 60/137,725 filed on 7-Jun.-1999, U.S. Appln. No. 60/145,220 filed on 23-Jul.-1999, U.S. Appln. No. 60/149,182 filed on 17-Aug.-1999, U.S. Appln. No. 60/152,317 filed on 3-Sep.-1999, U.S. Appln. No. 60/152,315 filed on 3-Sep.-1999, U.S. Appln. No. 60/155,709 filed on 24-Sep.-1999, U.S. Appln. No. 60/163,085 filed on 2-Nov.-1999, U.S. Appln. No. 60/172,411 filed on 17-Dec.-1999, U.S. Appln. No. 60/162,239 filed on 29-Oct.-1999, U.S. Appln. No. 60/215,139 filed on 30-Jun.-2000, U.S. Appln. No. 60/162,211 filed on 29-Oct.-1999, U.S. Appln. No. 60/215,138 filed on 30-Jun.-2000, U.S. Appln. No. 60/162,240 filed on 29-Oct.-1999, U.S. Appln. No. 60/215,131 filed on 30-Jun.-2000, U.S. Appln. No. 60/162,237 filed on 29-Oct.-1999, U.S. Appln. No. 60/219,666 filed on 21-Jul.-2000, U.S. Appln. No. 60/162,238 filed on 29-Oct.-1999, U.S. Appln. No. 60/215,134 filed on 30-Jun.-2000, U.S. Appln. No. 60/163,580 filed on 5-Nov.-1999, U.S. Appln. No. 60/215,130 filed on 30-Jun.-2000, U.S. Appln. No. 60/163,577 filed on 5-Nov.-1999, U.S. Appln. No. 60/215,137 filed on 30-Jun.-2000, U.S. Appln. No. 60/163,581 filed on 5-Nov.-1999, U.S. Appln. No. 60/215,133 filed on 30-Jun.-2000, U.S. Appln. No. 60/163,576 filed on 5-Nov.-1999, U.S. Appln. No. 60/221,366 filed on 27-Jul.-2000, U.S. Appln. No. 60/164,344 filed on 9-Nov.-1999, U.S. Appln. No. 60/195,296 filed on 7-Apr.-2000, U.S. Appln. No. 60/221,367 filed on 27-Jul.-2000, U.S. Appln. No. 60/164,835 filed on 12-Nov.-1999, U.S. Appln. No. 60/221,142 filed on 27-Jul.-2000, U.S. Appln. No. 60/164,744 filed on 12-Nov.-1999, U.S. Appln. No. 60/215,140 filed on 30-Jun.-2000, U.S. Appln. No. 60/164,735 filed on 12-Nov.-1999, U.S. Appln. No. 60/221,193 filed on 27-Jul.-2000, U.S. Appln. No. 60/164,825 filed on 12-Nov.-1999, U.S. Appln. No. 60/222,904 filed on 3-Aug.-2000, U.S. Appln. No. 60/164,834 filed on 12-Nov.-1999, U.S. Appln. No. 60/224,007 filed on 4-Aug.-2000, U.S. Appln. No. 60/164,750 filed on 12-Nov.-1999, U.S. Appln. No. 60/215,128 filed on 30-Jun.-2000, U.S. Appln. No. 60/166,415 filed on 19-Nov.-1999, U.S. Appln. No. 60/215,136 filed on 30-Jun.-2000, U.S. Appln. No. 60/166,414 filed on 19-Nov.-1999, U.S. Appln. No. 60/219,665 filed on 21-Jul.-2000, U.S. Appln. No. 60/164,731 filed on 12-Nov.-1999, U.S. Appln. No. 60/215,132 filed on 30-Jun.-2000, U.S. Appln. No. 60/226,280 filed on 18-Aug.-2000, U.S. Appln. No. 60/256,968 filed on 21-Dec.-2000, U.S. Appln. No. 60/226,380 filed on 18-Aug.-2000, U.S. Appln. No. 60/259,803 filed on 5-Jan.-2001, U.S. Appln. No. 60/228,084 filed on 28-Aug.-2000, U.S. application Ser. No. 09/915,582 filed on 27-Jul.-2001, U.S. Appln. No. 60/231,968 filed on 12-Sep.-2000, U.S. Appln. No. 60/236,326 filed on 29-Sep.-2000, U.S. Appln. No. 60/234,211 filed on 20-Sep.-2000, U.S. Appln. No. 60/226,282 filed on 18-Aug.-2000, U.S. Appln. No. 60/232,104 filed on 12-Sep.-2000, U.S. Appln. No. 60/234,210 filed on 20-Sep.-2000, U.S. Appln. No. 60/226,278 filed on 18-Aug.-2000, U.S. Appln. No. 60/259,805 filed on 5-Jan.-2001, U.S. Appln. No. 60/226,279 filed on 18-Aug.-2000, U.S. Appln. No. 60/259,678 filed on 5-Jan.-2001, U.S. Appln. No. 60/226,281 filed on 18-Aug.-2000, U.S. Appln. No. 60/231,969 filed on 12-Sep.-2000, U.S. Appln. No. 60/228,086 filed on 28-Aug.-2000, U.S. Appln. No. 60/259,516 filed on 4-Jan.-2001, U.S. Appln. No. 60/228,083 filed on 28-Aug.-2000, U.S. Appln. No. 60/259,804 filed on 5-Jan.-2001, U.S. Appln. No. 60/270,658 filed on 23-Feb.-2001, U.S. Appln. No. 60/304,444 filed on 12-Jul.-2001, U.S. Appln. No. 60/270,625 filed on 23-Feb.-2001, U.S. Appln. No. 60/304,417 filed on 12-Jul.-2001, U.S. Appln. No. 60/295,869 filed on 6-Jun.-2001, U.S. Appln. No. 60/304,121 filed on 11-Jul.-2001, U.S. Appln. No. 60/311,085 filed on 10-Aug.-2001, U.S. Appln. No. 60/325,209 filed on 28-Sep.-2001, U.S. Appln. No. 60/330,629 filed on 26-Oct.-2001, U.S. Appln. No. 60/331,046 filed on 7-Nov.-2001, U.S. Appln. No. 60/358,554 filed on 22-Feb.-2002, U.S. Appln. No. 60/358,714 filed on 25-Feb.-2002, U.S. Appln. No. 60/277,340 filed on 21-Mar.-2001, U.S. Appln. No. 60/306,171 filed on 19-Jul.-2001, U.S. Appln. No. 60/278,650 filed on 27-Mar.-2001, U.S. Appln. No. 60/331,287 filed on 13-Nov.-2001, U.S. application Ser. No. 09/950,082 filed on 12-Sep.-2001, U.S. application Ser. No. 09/950,083 filed on 12-Sep.-2001, PCT Appln. No. US00/29363 filed on 25-Oct.-2000, PCT Appln. No. US00/29360 filed on 25-Oct.-2000, PCT Appln. No. US00/29362 filed on 25-Oct.-2000, PCT Appln. No. US00/29365 filed on 25-Oct.-2000, PCT Appln. No. US00/29364 filed on 25-Oct.-2000, PCT Appln. No. US00/30040 filed on 1-Nov.-2000, PCT Appln. No. US00/30037 filed on 1-Nov.-2000, PCT Appln. No. US00/30045 filed on 1-Nov.-2000, PCT Appln. No. US00/30036 filed on 1-Nov.-2000, PCT Appln. No. US00/30039 filed on 1-Nov.-2000, PCT Appln. No. US00/30654 filed on 8-Nov.-2000, PCT Appln. No. US00/30628 filed on 8-Nov.-2000, PCT Appln. No. US00/30653 filed on 8-Nov.-2000, PCT Appln. No. US00/30629 filed on 8-Nov.-2000, PCT Appln. No. US00/30679 filed on 8-Nov.-2000, PCT Appln. No. US00/30674 filed on 8-Nov.-2000, PCT Appln. No. US00/31162 filed on 15-Nov.-2000, PCT Appln. No. US00/31282 filed on 15-Nov.-2000, PCT Appln. No. US00/30657 filed on 8-Nov.-2000, PCT Appln. No. US01/01396 filed on 17-Jan.-2001, PCT Appln. No. US01/01387 filed on 17-Jan.-2001, PCT Appln. No. US01/01567 filed on 17-Jan.-2001, PCT Appln. No. US01/01431 filed on 17-Jan.-2001, PCT Appln. No. US01/01432 filed on 17-Jan.-2001, PCT Appln. No. US01/00544 filed on 9-Jan.-2001, PCT Appln. No. US01/01435 filed on 17-Jan.-2001, PCT Appln. No. US01/01386 filed on 17-Jan.-2001, PCT Appln. No. US01/01565 filed on 17-Jan.-2001, PCT Appln. No. US01/01394 filed on 17-Jan.-2001, PCT Appln. No. US01/01434 filed on 17-Jan.-2001, PCT Appln. No. US01/01397 filed on 17-Jan.-2001, PCT Appln. No. US01/01385 filed on 17-Jan.-2001, PCT Appln. No. US01/01384 filed on 17-Jan.-2001, PCT Appln. No. US01/01383 filed on 17-Jan.-2001, PCT Appln. No. US02/05064 filed on 21-Feb.-2002, PCT Appln. No. US02/05301 filed on 21-Feb.-2002, U.S. application Ser. No. 09/148,545 filed on 4-Sep.-1998, U.S. application Ser. No. 09/621,011 filed on 20-Jul.-2000, U.S. application Ser. No. 09/981,876 filed on 19-Oct.-2001, U.S. application Ser. No. 09/149,476 filed on 8-Sep.-1998, U.S. application Ser. No. 09/809,391 filed on 16-Mar.-2001, U.S. application Ser. No. 09/882,171 filed on 18-Jun.-2001, U.S. Appln. No. 60/190,068 filed on 17-Mar.-2000, U.S. application Ser. No. 09/152,060 filed on 11-Sep.-1998, U.S. application Ser. No. 09/852,797 filed on 11-May-2001, U.S. application Ser. No. 09/853,161 filed on 11-May-2001, U.S. application Ser. No. 09/852,659 filed on 11-May-2001, U.S. application Ser. No. 10/058,993 filed on 30-Jan.-2002, U.S. Appln. No. 60/265,583 filed on 2-Feb.-2001, U.S. application Ser. No. 09/154,707 filed on 17-Sep.-1998, U.S. application Ser. No. 09/966,262 filed on 1-Oct.-2001, U.S. application Ser. No. 09/983,966 filed on 26-Oct.-2001, U.S. application Ser. No. 10/059,395 filed on 31-Jan.-2002, U.S. application Ser. No. 09/984,245 filed on 29-Oct.-2001, U.S. application Ser. No. 09/166,780 filed on 6-Oct.-1998, U.S. application Ser. No. 09/577,145 filed on 24-May-2000, U.S. application Ser. No. 09/814,122 filed on 22-Mar.-2001, U.S. application Ser. No. 09/189,144 filed on 10-Nov.-1998, U.S. application Ser. No. 09/690,454 filed on 18-Oct.-2000, U.S. application Ser. No. 10/062,831 filed on 5-Feb.-2002, U.S. application Ser. No. 10/062,599 filed on 5-Feb.-2002, U.S. application Ser. No. 09/205,258 filed on 4-Dec.-1998, U.S. application Ser. No. 09/933,767 filed on 22-Aug.-2001, U.S. Appln. No. 60/184,836 filed on 24-Feb.-2000, U.S. Appln. No. 60/193,170 filed on 29-Mar.-2000, U.S. application Ser. No. 10/023,282 filed on 20-Dec.-2001, U.S. application Ser. No. 10/004,860 filed on 7-Dec.-2001, U.S. application Ser. No. 09/209,462 filed on 11-Dec.-1998, U.S. application Ser. No. 09/213,365 filed on 17-Dec.-1998, U.S. application Ser. No. 09/627,081 filed on 27-Jul.-2000, U.S. application Ser. No. 09/227,357 filed on 8-Jan.-1999, U.S. application Ser. No. 09/983,802 filed on 25-Oct.-2001, U.S. application Ser. No. 09/973,278 filed on 10-Oct.-2001, U.S. Appln. No. 60/239,899 filed on 13-Oct.-2000, U.S. application Ser. No. 09/984,490 filed on 30-Oct.-2001, U.S. application Ser. No. 09/776,724 filed on 6-Feb.-2001, U.S. application Ser. No. 09/229,982 filed on 14-Jan.-1999, U.S. application Ser. No. 09/669,688 filed on 26-Sep.-2000, U.S. Appln. No. 60/180,909 filed on 8-Feb.-2000, U.S. application Ser. No. 09/236,557 filed on 26-Jan.-1999, U.S. application Ser. No. 09/666,984 filed on 21-Sep.-2000, U.S. application Ser. No. 09/820,649 filed on 30-Mar.-2001, U.S. Appln. No. 60/295,558 filed on 5-Jun.-2001, U.S. application Ser. No. 09/244,112 filed on 4-Feb.-1999, U.S. application Ser. No. 09/774,639 filed on 1-Feb.-2001, U.S. application Ser. No. 09/969,730 filed on 4-Oct.-2001, U.S. Appln. No. 60/238,291 filed on 6-Oct.-2000, U.S. application Ser. No. 09/251,329 filed on 17-Feb.-1999, U.S. application Ser. No. 09/716,128 filed on 17-Nov.-2000, U.S. application Ser. No. 09/257,179 filed on 25-Feb.-1999, U.S. application Ser. No. 09/729,835 filed on 6-Dec.-2000, U.S. application Ser. No. 09/262,109 filed on 4-Mar.-1999, U.S. application Ser. No. 09/722,329 filed on 28-Nov.-2000, U.S. application Ser. No. 09/722,329 filed on 17-Jan.-2002, U.S. Appln. No. 60/262,066 filed on 18-Jan.-2001, U.S. application Ser. No. 09/281,976 filed on 31-Mar.-1999, U.S. application Ser. No. 09/288,143 filed on 8-Apr.-1999, U.S. application Ser. No. 09/984,429 filed on 30-Oct.-2001, U.S. Appln. No. 60/244,591 filed on 1-Nov.-2000, U.S. application Ser. No. 09/296,622 filed on 23-Apr.-1999, U.S. application Ser. No. 09/305,736 filed on 5-May-1999, U.S. application Ser. No. 09/818,683 filed on 28-Mar.-2001, U.S. application Ser. No. 09/974,879 filed on 12-Oct.-2001, U.S. Appln. No. 60/239,893 filed on 13-Oct.-2000, U.S. application Ser. No. 09/334,595 filed on 17-Jun.-1999, U.S. application Ser. No. 09/348,457 filed on 7-Jul.-1999, U.S. application Ser. No. 09/739,907 filed on 20-Dec.-2000, U.S. application Ser. No. 09/938,671 filed on 27-Aug.-2001, U.S. application Ser. No. 09/363,044 filed on 29-Jul.-1999, U.S. application Ser. No. 09/813,153 filed on 21-Mar.-2001, U.S. application Ser. No. 09/949,925 filed on 12-Sep.-2001, U.S. Appln. No. 60/232,150 filed on 12-Sep.-2000, U.S. application Ser. No. 09/369,247 filed on 5-Aug.-1999, U.S. application Ser. No. 10/062,548 filed on 5-Feb.-2002, U.S. application Ser. No. 09/382,572 filed on 25-Aug.-1999, U.S. application Ser. No. 09/716,129 filed on 17-Nov.-2000, U.S. application Ser. No. 09/393,022 filed on 9-Sep.-1999, U.S. application Ser. No. 09/798,889 filed on 6-Mar.-2001, U.S. application Ser. No. 09/397,945 filed on 17-Sep.-1999, U.S. application Ser. No. 09/437,658 filed on 10-Nov.-1999, U.S. application Ser. No. 09/892,877 filed on 28-Jun.-2001, U.S. application Ser. No. 09/948,783 filed on 10-Sep.-2001, U.S. Appln. No. 60/231,846 filed on 11-Sep.-2000, U.S. application Ser. No. 09/461,325 filed on 14-Dec.-1999, U.S. application Ser. No. 10/050,873 filed on 18-Jan.-2002, U.S. Appln. No. 60/263,230 filed on 23-Jan.-2001, U.S. Appln. No. 60/263,681 filed on 24-Jan.-2001, U.S. application Ser. No. 10/012,542 filed on 12-Dec.-2001, U.S. application Ser. No. 09/482,273 filed on 13-Jan.-2000, U.S. Appln. No. 60/234,925 filed on 25-Sep.-2000, U.S. application Ser. No. 09/984,276 filed on 29-Oct.-2001, U.S. application Ser. No. 09/984,271 filed on 29-Oct.-2001, U.S. application Ser. No. 09/489,847 filed on 24-Jan.-2000, U.S. Appln. No. 60/350,898 filed on 25-Jan.-2002, U.S. application Ser. No. 09/511,554 filed on 23-Feb.-2000, U.S. application Ser. No. 09/739,254 filed on 19-Dec.-2000, U.S. application Ser. No. 09/904,615 filed on 16-Jul.-2001, U.S. application Ser. No. 10/054,988 filed on 25-Jan.-2002, U.S. application Ser. No. 09/531,119 filed on 20-Mar.-2000, U.S. application Ser. No. 09/820,893 filed on 30-Mar.-2001, U.S. application Ser. No. 09/565,391 filed on 5-May-2000, U.S. application Ser. No. 09/948,820 filed on 10-Sep.-2001, U.S. application Ser. No. 09/591,316 filed on 9-Jun.-2000, U.S. application Ser. No. 09/895,298 filed on 2-Jul.-2001, U.S. application Ser. No. 09/618,150 filed on 17-Jul.-2000, U.S. application Ser. No. 09/985,153 filed on 1-Nov.-2001, U.S. application Ser. No. 09/628,508 filed on 28-Jul.-2000, U.S. application Ser. No. 09/997,131 filed on 30-Nov.-2001, U.S. application Ser. No. 09/661,453 filed on 13-Sep.-2000, U.S. application Ser. No. 10/050,882 filed on 18-Jan.-2002, U.S. application Ser. No. 09/684,524 filed on 10-Oct.-2000, U.S. application Ser. No. 10/050,704 filed on 18-Jan.-2002, U.S. application Ser. No. 09/726,643 filed on 1-Dec.-2000, U.S. application Ser. No. 10/042,141 filed on 11-Jan.-2002, U.S. application Ser. No. 09/756,168 filed on 9-Jan.-2001, U.S. application Ser. No. 09/781,417 filed on 13-Feb.-2001, U.S. application Ser. No. 10/060,255 filed on 1-Feb.-2002, U.S. application Ser. No. 09/789,561 filed on 22-Feb.-2001, U.S. application Ser. No. 09/800,729 filed on 8-Mar.-2001, U.S. application Ser. No. 09/832,129 filed on 11-Apr.-2001, PCT Appln. No. US98/04482 filed on 6-Mar.-1998, PCT Appln. No. US98/04493 filed on 6-Mar.-1998, PCT Appln. No. US98/04858 filed on 12-Mar.-1998, PCT Appln. No. US98/05311 filed on 19-Mar.-1998, PCT Appln. No. US98/06801 filed on 7-Apr.-1998, PCT Appln. No. US98/10868 filed on 28-May-1998, PCT Appln. No. US98/11422 filed on 4-Jun.-1998, PCT Appln. No. US01/05614 filed on 21-Feb.-2001, PCT Appln. No. US98/12125 filed on 11-Jun.-1998, PCT Appln. No. US98/13608 filed on 30-Jun.-1998, PCT Appln. No. US98/13684 filed on 7-Jul.-1998, PCT Appln. No. US98/14613 filed on 15-Jul.-1998, PCT Appln. No. US98/15949 filed on 29-Jul.-1998, PCT Appln. No. US98/16235 filed on 4-Aug.-1998, PCT Appln. No. US98/17044 filed on 18-Aug.-1998, PCT Appln. No. US98/17709 filed on 27-Aug.-1998, PCT Appln. No. US98/18360 filed on 3-Sep.-1998, PCT Appln. No. US02/01109 filed on 17-Jan.-2002, PCT Appln. No. US98/20775 filed on 1-Oct.-1998, PCT Appln. No. US98/21142 filed on 8-Oct.-1998, PCT Appln. No. US98/22376 filed on 23-Oct.-1998, PCT Appln. No. US98/23435 filed on 4-Nov.-1998, PCT Appln. No. US98/27059 filed on 17-Dec.-1998, PCT Appln. No. US99/00108 filed on 6-Jan.-1999, PCT Appln. No. US99/01621 filed on 27-Jan.-1999, PCT Appln. No. US99/02293 filed on 4-Feb.-1999, PCT Appln. No. US99/03939 filed on 24-Feb.-1999, PCT Appln. No. US99/05721 filed on 11-Mar.-1999, PCT Appln. No. US99/05804 filed on 18-Mar.-1999, PCT Appln. No. US99/09847 filed on 6-May-1999, PCT Appln. No. US99/13418 filed on 15-Jun.-1999, PCT Appln. No. US99/15849 filed on 14-Jul.-1999, PCT Appln. No. US01/00911 filed on 12-Jan.-2001, PCT Appln. No. US01/29871 filed on 24-Sep.-2001, PCT Appln. No. US99/17130 filed on 29-Jul.-1999, PCT Appln. No. US99/19330 filed on 24-Aug.-1999, PCT Appln. No. US99/22012 filed on 22-Sep.-1999, PCT Appln. No. US99/26409 filed on 9-Nov.-1999, PCT Appln. No. US99/29950 filed on 16-Dec.-1999, PCT Appln. No. US00/00903 filed on 18-Jan.-2000, PCT Appln. No. US00/03062 filed on 8-Feb.-2000, PCT Appln. No. US00/06783 filed on 16-Mar.-2000, PCT Appln. No. US00/08979 filed on 6-Apr.-2000, PCT Appln. No. US00/15187 filed on 2-Jun.-2000, PCT Appln. No. US00/19735 filed on 20-Jul.-2000, PCT Appln. No. US00/22325 filed on 16-Aug.-2000, PCT Appln. No. US00/24008 filed on 31-Aug.-2000, PCT Appln. No. US00/26013 filed on 22-Sep.-2000, PCT Appln. No. US00/28664 filed on 17-Oct.-2000, U.S. application Ser. No. 09/833,245 filed on 12-Apr.-2001, and PCT Appln. No. US01/11988 filed on 12-Apr.-2001, U.S. application Ser. No. 10/100,683 filed 19-Mar.-2002, PCT Appln. No. US02/08278 filed on 19-Mar.-2002, PCT Appln. No. US02/08279 filed on 19-Mar.-2002, PCT Appln. No. US02/08123 filed on 19-Mar.-2002, PCT Appln. No. US02/09785 filed on 19-Mar.-2002, PCT Appln. No. US02/08276 filed on 19-Mar.-2002, PCT Appln. No. US02/08277 filed on 19-Mar.-2002, and PCT Appln. No. US02/08124 filed on 19-Mar.-2002.

LENGTHY TABLE
The patent application contains a lengthy table section. A copy of the table is available in electronic form from the USPTO web site (http://seqdata.uspto.gov/?pageRequest=docDetail&DocID=US20070055056A1). An electronic copy of the table will also be available from the USPTO upon request and payment of the fee set forth in 37 CFR 1.19(b)(3).

What is claimed is:

1. An isolated nucleic acid molecule comprising a first polynucleotide sequence at least 95% identical to a second polynucleotide sequence selected from the group consisting of:
(a) a polynucleotide fragment of SEQ ID NO:X as referenced in Table 1A;
(b) a polynucleotide encoding a full length polypeptide of SEQ ID NO:Y or a full length polypeptide encoded by the cDNA Clone ID in ATCC Deposit No:Z corresponding to SEQ ID NO:Y as referenced in Table 1A;
(c) a polynucleotide encoding a polypeptide fragment of SEQ ID NO:Y or a polypeptide fragment encoded by the cDNA Clone ID in ATCC Deposit No:Z corresponding to SEQ ID NO:Y as referenced in Table 1A;
(d) a polynucleotide encoding a polypeptide fragment of SEQ ID NO:Y or a polypeptide fragment encoded by the cDNA Clone ID in ATCC Deposit No:Z corresponding to SEQ ID NO:Y as referenced in Table 1A, wherein said fragment has biological activity;
(e) a polynucleotide encoding a polypeptide domain of SEQ ID NO:Y as referenced in Table 1B;
(f) a polynucleotide encoding a polypeptide domain of SEQ ID NO:Y as referenced in Table 2;
(g) a polynucleotide encoding a predicted epitope of SEQ ID NO:Y as referenced in Table 1B; and
(h) a polynucleotide capable of hybridizing under stringent conditions to any one of the polynucleotides specified in (a)-(g), wherein said polynucleotide does not hybridize under stringent conditions to a nucleic acid molecule having a nucleotide sequence of only A residues or of only T residues.

2. The isolated nucleic acid molecule of claim 1, wherein the polynucleotide fragment comprises a nucleotide sequence encoding a secreted form of SEQ ID NO:Y or a secreted form of the polypeptide encoded by the cDNA Clone ID in ATCC Deposit No:Z corresponding to SEQ ID NO:Y, as referenced in Table 1A.

3. The isolated nucleic acid molecule of claim 1, wherein the polynucleotide fragment comprises a nucleotide sequence encoding the sequence identified as SEQ ID NO:Y or the polypeptide encoded by the cDNA sequence included in ATCC Deposit No:Z, which is hybridizable to SEQ ID NO:X, as referenced in Table 1A.

4. The isolated nucleic acid molecule of claim 1, wherein the polynucleotide fragment comprises the entire nucleotide sequence of SEQ ID NO:X or the cDNA sequence included in ATCC Deposit No:Z, which is hybridizable to SEQ ID NO:X, as referenced in Table 1A.

5. The isolated nucleic acid molecule of claim 2, wherein the nucleotide sequence comprises sequential nucleotide deletions from either the C-terminus or the N-terminus.

6. The isolated nucleic acid molecule of claim 3, wherein the nucleotide sequence comprises sequential nucleotide deletions from either the C-terminus or the N-terminus.

7. A recombinant vector comprising the isolated nucleic acid molecule of claim 1.

8. A method of making a recombinant host cell comprising the isolated nucleic acid molecule of claim 1.

9. A recombinant host cell produced by the method of claim 8.

10. The recombinant host cell of claim 9 comprising vector sequences.

11. A polypeptide comprising a first amino acid sequence at least 95% identical to a second amino acid sequence selected from the group consisting of:
(a) a full length polypeptide of SEQ ID NO:Y or a full length polypeptide encoded by the cDNA Clone ID in ATCC Deposit No:Z corresponding to SEQ ID NO:Y as referenced in Table 1A;
(b) a secreted form of SEQ ID NO:Y or a secreted form of the polypeptide encoded by the cDNA Clone ID in ATCC Deposit No:Z corresponding to SEQ ID NO:Y as referenced in Table 1A;
(c) a polypeptide fragment of SEQ ID NO:Y or a polypeptide fragment encoded by the cDNA Clone ID in ATCC Deposit No:Z corresponding to SEQ ID NO:Y as referenced in Table 1A;
(d) a polypeptide fragment of SEQ ID NO:Y or a polypeptide fragment encoded by the cDNA Clone ID in ATCC Deposit No:Z corresponding to SEQ ID NO:Y as referenced in Table 1A, wherein said fragment has biological activity;
(e) a polypeptide domain of SEQ ID NO:Y as referenced in Table 1B;
(f) a polypeptide domain of SEQ ID NO:Y as referenced in Table 2; and
(g) a predicted epitope of SEQ ID NO:Y as referenced in Table 1B.

12. The polypeptide of claim 11, wherein said polypeptide comprises a heterologous amino acid sequence.

13. The isolated polypeptide of claim 11, wherein the secreted form or the full length protein comprises sequential amino acid deletions from either the C-terminus or the N-terminus.

14. An isolated antibody that binds specifically to the isolated polypeptide of claim 11.

15. A recombinant host cell that expresses the isolated polypeptide of claim 11.

16. A method of making an isolated polypeptide comprising:
(a) culturing the recombinant host cell of claim 15 under conditions such that said polypeptide is expressed; and
(b) recovering said polypeptide.

17. The polypeptide produced by claim 16.

18. A method for preventing, treating, or ameliorating diabetes or conditions related to diabetes, comprising administering to a mammalian subject a therapeutically effective amount of the polypeptide of claim 11.

19. A method of diagnosing diabetes or conditions related to diabetes, or diagnosing susceptibility to diabetes or conditions related to diabetes in a subject comprising:
(a) determining the presence or absence of a mutation in the polynucleotide of claim 11; and
(b) diagnosing diabetes or conditions related to diabetes or the susceptibility to diabetes or conditions related to diabetes based on the presence or absence of said mutation.

20. A method of diagnosing diabetes or conditions related to diabetes, or diagnosing susceptibility to diabetes or conditions related to diabetes in a subject comprising:
(a) determining the presence or amount of expression of the polypeptide of claim 11 in a biological sample; and
(b) diagnosing diabetes or conditions related to diabetes or the susceptibility to diabetes or conditions related to diabetes based on the presence or amount of expression of the polypeptide.

21. A method for identifying a binding partner to the polypeptide of claim 11 comprising:
(a) contacting the polypeptide of claim 43 with a binding partner; and
(b) determining whether the binding partner effects an activity of the polypeptide.

22. The gene corresponding to the cDNA sequence of SEQ ID NO:X.

23. A method of identifying an activity in a biological assay, wherein the method comprises:
(a) expressing SEQ ID NO:X in a cell;
(b) isolating the supernatant;
(c) detecting an activity in a biological assay; and
(d) identifying the protein in the supernatant having the activity.

24. The product produced by the method of claim 20.

The application's sequence listing, which the Patent Office published only in electronic form, follows.

SEQUENCE LISTING (877 sequences)

SEQ ID NO: 1 - DNA, 733 bp, Homo sapiens
gggatccggagcccaaatcttctgacaaaactcacacatgcccaccgtgcccagcacctgaattcgagggtgcaccgtcagtcttcctcttccccccaaaacccaaggacaccctcatgatctcccggactcctgaggtcacatgcgtggtggtggacgtaagccacgaagaccctgaggtcaagttcaactggtacgtggacggcgtggaggtgcataatgccaagacaaagccgcgggaggagcagtacaacagcacgtaccgtgtggtcagcgtcctcaccgtcctgcaccaggactggctgaatggcaaggagtacaagtgcaaggtctccaacaaagccctcccaacccccatcgagaaaaccatctccaaagccaaagggcagccccgagaaccacaggtgtacaccctgcccccatcccgggatgagctgaccaagaaccaggtcagcctgacctgcctggtcaaaggcttctatccaagcgacatcgccgtggagtgggagagcaatgggcagccggagaacaactacaagaccacgcctcccgtgctggactccgacggctccttcttcctctacagcaagctcaccgtggacaagagcaggtggcagcaggggaacgtcttctcatgctccgtgatgcatgaggctctgcacaaccactacacgcagaagagcctctccctgtctccgggtaaatgagtgcgacggccgcgactctagaggat

SEQ ID NO: 2 - protein, 5 aa, Homo sapiens
  Site (3): Xaa equals any of the twenty naturally ocurring L-amino acids
WSXWS

SEQ ID NO: 3 - DNA, 86 bp, Artificial Sequence
  Primer_Bind: Synthetic sequence with 4 tandem copies of the GAS binding site found in the IRF1 promoter (Rothman et al., Immunity 1:457-468 (1994)), 18 nucleotides complementary to the SV40 early promoter, and a Xho I restriction site.
gcgcctcgagatttccccgaaatctagatttccccgaaatgatttccccgaaatgatttccccgaaatatctgccatctcaattag

SEQ ID NO: 4 - DNA, 27 bp, Artificial Sequence
  Primer_Bind: Synthetic sequence complementary to the SV40 promoter; includes a Hind III restriction site.
gcggcaagctttttgcaaagcctaggc

SEQ ID NO: 5 - DNA, 271 bp, Artificial Sequence
  Protein_Bind: Synthetic promoter for use in biological assays; includes GAS binding sites found in the IRF1 promoter (Rothman et al., Immunity 1:457-468 (1994)).
ctcgagatttccccgaaatctagatttccccgaaatgatttccccgaaatgatttccccgaaatatctgccatctcaattagtcagcaaccatagtcccgcccctaactccgcccatcccgcccctaactccgcccagttccgcccattctccgccccatggctgactaattttttttatttatgcagaggccgaggccgcctcggcctctgagctattccagaagtagtgaggaggcttttttggaggcctaggcttttgcaaaaagctt

SEQ ID NO: 6 - DNA, 32 bp, Artificial Sequence
  Primer_Bind: Synthetic primer complementary to human genomic EGR-1 promoter sequence (Sakamoto et al., Oncogene 6:867-871 (1991)); includes a Xho I restriction site.
gcgctcgagggatgacagcgatagaaccccgg

SEQ ID NO: 7 - DNA, 31 bp, Artificial Sequence
  Primer_Bind: Synthetic primer complementary to human genomic EGR-1 promoter sequence (Sakamoto et al., Oncogene 6:867-871 (1991)); includes a Hind III restriction site.
gcgaagcttcgcgactccccggatccgcctc

SEQ ID NO: 8 - DNA, 12 bp, Homo sapiens
ggggactttccc

SEQ ID NO: 9 - DNA, 73 bp, Artificial Sequence
  Primer_Bind: Synthetic primer with 4 tandem copies of the NF-KB binding site (GGGGACTTTCCC), 18 nucleotides complementary to the 5' end of the SV40 early promoter sequence, and a XhoI restriction site.
gcggcctcgaggggactttcccggggactttccggggactttccgggactttccatcctgccatctcaattag

SEQ ID NO: 10 - DNA, 256 bp, Artificial Sequence
  Protein_Bind: Synthetic promoter for use in biological assays; includes NF-KB binding sites.
ctcgaggggactttcccggggactttccggggactttccgggactttccatctgccatctcaattagtcagcaaccatagtcccgcccctaactccgcccatcccgcccctaactccgcccagttccgcccattctccgccccatggctgactaattttttttatttatgcagaggccgaggccgcctcggcctctgagctattccagaagtagtgaggaggcttttttggaggcctaggcttttgcaaaaagctt

SEQ ID NO: 11 - DNA, 2703 bp, Homo sapiens
ggcacgagatttcctacaggtgaaacgccatcattaggattcactgtaacgttagtgctattaaactcactagcatttttattaatggccgttatctacactaagctatactgcaacttggaaaaagaggacctctcagaaaactcacaatctagcatgattaagcatgtcgcttggctaatcttcaccaattgcatctttttctgccctgtggcgtttttttcatttgcaccattgatcactgcaatctctatcagccccgaaataatgaagtctgttactctgatattttttccattgcctgcttgcctgaatccagtcctgtatgttttcttcaacccaaagtttaaagaagactggaagttactgaagcgacgtgttaccaagaaaagtggatcagtttcagtttccatcagtagccaaggtggttgtctggaacaggatttctactacgactgtggcatgtactcacatttgcagggcaacctgactgtttgcgactgctgcgaatcgtttcttttaacaaagccagtatcatgcaaacacttgataaaatcacacagctgtcctgcattggcagtggcttcttgccaaagacctgagggctactggtccgactgtggcacacagtcggcccactctgattatgcagatgaagaagattcctttgtctcagacagttctgaccaggtgcaggcctgtggacgagcctgcttctaccagagtagaggattccctttggtgcgctatgcttacaatctaccaagagttaaagactgaactactgtgtgtgtaaccgtttcccccgtcaaccaaaatcagtgtttatagagtgaaccctattctcatctttcatctgggaagcacttctgtaatcactgcctggtgtcacttagaagaaggagaggtggcagtttatttctcaaaccagtcattttcaaagaacaggtgcctaaattataaattggtgaaaaatgcaatgtccaagcaatgtatgatctgtttgaaacaaatatatgacttgaaaaggatcttaggtgtagtagagcaatataatgttagttttttctgatccataagaagcaaatttatacctatttgtgtattaagcacaagataaagaacagctgttaatattttttaaaaatctattttaaaatgtgattttctataactgaagaaaatatcttgctaattttacctaatgtttcatccttaatctcaggacaacttactgcagggccaaaaaagggactgtcccagctagaactgtgagagtatacataggcattactttattatgttttcacttgccatccttgacataagagaactataaattttgtttaagcaatttataaatctaaaacctgaagatgtttttaaaacaatattaacagctgttaggttaaaaaaatagctggacatttgttttcagtcattatacattgctttggtccaatcagtaattttttcttaagtgttttgtgattacactactagaaaaaaagtaaaaggctaattgctgtgtgggtttagtcgatttggctaaactactaactaatgtgggggtttaatagtatctgagggatttggtggcttcatgtaatgttctcattaatgaatacttcctaatatcgttggctctactaatattttccaatttgctgggatgtcacctagcaatagcttggattatatagaaagtaaactgtggtcaatacttgcatttaattagacgaaacggggagtaattatgacacgaagtacttatgtttatttcttagtgagctggattatcttgaacctgtgctattaaatggaaatttccatacatcttccccatactattttttataaaagagcctattcaatagctcagaggttgaactctggttaaacaagataatatgttattaataaaaatagaagaagaaagaataaagcttagtcctgtgtctttaaaaattaaaaattttacttgattcccatctatgggctttagacctattactgggtggagtcttaaagttataattgttcaatatgttttttgaacagtgtgctaaatcaatagcaaacccactgccatattagttattctgaatatactaaaaaaatccagctagattgcagtttaataattaaactgtacatactgtgcatataatgaatttttatcttatgtaaattatttttagaacacaagttgggaaatgtggcttctgttcatttcgtttaattaaagctacctcctaaactatagtggctgccagtagcagactgttaaattgtggtttatatactttttgcattgtaaatagtctttgttgtacattgtcagtgtaataaaaacagaatctttgtatatcaaaatcatgtagtttgtataaaatgtgggaaggatttatttacagtgtgttgtaattttgtaaggccaactatttacaagttttaaaaattgctatcatgtatatttacacatctgataaatattaaatcataacttggtaagaaactcctaattaaaaggttttttccaaaattcaggttattgaaaatttttcattttattcatttaaaaactagaataacagatatataaaagtgttaatctttgtgctatatggtatgaaatacaatattgtactcagtgttttgaattattaaagtttctagaaagcaaaaaaaaaaaaaaaaaaa

SEQ ID NO: 12 - DNA, 760 bp, Homo sapiens
  misc_feature (13)..(13): n equals a,t,g, or c
  misc_feature (300)..(300): n equals a,t,g, or c
  misc_feature (425)..(425): n equals a,t,g, or c
cggacgcgtgggncggacgcgtggggaaaaaataacaaaacaaaaaacaagaaaaaaaaaacacaaaaccccgtaaaatcacaaagaaaatccaacaccaaaggcgcagaagccggctggccgtggtgggggcagcgtaggcgtasatccctctcctctcacttagcctgttgactcttgttattatcatgatattcacaaaacgccgcatgtttaaaaagtcatagatgtcatcttctctctgcccccagggaggaaagccaccttctcttgccccttggcccctttgtcaggggccangggtctgccgggtgggggtgccaacaggcctggccctttcctcccctgcatccagccatgggggcctctgcgattgccggaaggttgcatggctggtcccagggccagcacaggcccgaggccgngctgcctggttttatttttatttaactttattttctgttttatgagtgtgtgtccgcccacccccacccccttcagtgttaagtggggagccctgggggagtctctcctgcctcccagcctctcccaagacctcccccctcgtcaccagccatccctctggaccaggcagagggcggaccgggtgggcaggggcctgagggtggctcgggccagcccaccagccaatggacccctcctcaggccgccagtgtcgccctgcccctttttaaaacaaaatgccctcgtttgtaaacccttagacgcttgagaataaaccccttccttttcttccaaa

SEQ ID NO: 13 - DNA, 1445 bp, Homo sapiens
ggcacgagggatttgaacaagatcattagaattcaaaaaacaccagaaatgaaagatctttcctgaagctgtttaggaatattcatgatatacccttaactgttctagagaacaaaatgcgtctgtgctccttcacaaaagtccctatgaatttgtttctcaatgtgatccttcttaagttctataactttttgttttcattaattttaggaaaatcctgccttgcttcgttgggcctatgcaagaacaataaatgtctatcctaatttcagacccactcctaaaaactcactcatgggagctctgtgtggatttgggcccctcatcttcatttattatattatcaaaactgagagggtaagtattcagaccagatgtttagtatttgagtgataggttcactttctagggaccagctgcagctccttctcttgaagattgccaccagtgcccctcccaccttggggctgtcctctgccttcccttcctctcttcttttatctttattcctttccagcaggagttaaaacagaaagttttcagtcacctttgtctatttttgttagttcatttgttttttaaaaagatgatgtttattgggttaagtattagcagaatacataaatcatttagtacgtttcctgtttgcgtgaattctatttatgttggtcacattttgcaaattaatgttaaaacctattaatactctacgggacagagaagcacaagctgcctgtgtggggaatagctgccgtcagcagcctgggtatatgattggagagaaagtcaagctgatctttggcaccaaaccattccacatctggtactaaaccctgagctgcagcccccaggcttgtgttgccactggagcccactcgtctagctttgtctttaactggcccatctgcattcccattagagttcgtgtattttgattatctggtgaatgatctacttaacagaaaggtagtccacattttcccagaaagtgtttgcattttgctttcaatatatggttttatgggataatatatttctaatgactaaaatgtgagtaagatgtttttgaataggagcattttcttactgtgtctttagttcctcggattactgtttcttcgcacactccctgggctttagacagtgggattgcaattaggtttggagtgtttcattctgtttgtcagttgtacggtgggttgtgccaaaatgcagtttttcttaccttttttatttatttatttttatctaatatagccaactggcagaatatattgtctttaatgtactttttttctgtctttacaggataggaaagaaaaacttatccaggaaggaaaattggatcgaacatttcacctctcatattaagtctggcaatgatgactatatgtattcctgcctaaataaatcatctattaatcattaaaaaaaaaaaaaaaaaa

SEQ ID NO: 14 - DNA, 1722 bp, Homo sapiens
ggcacgagccagagcaggctgctaggcctggggccaccactgcccctgggtgctacacccagtgtgctgggtcactgggaacttcctgaagtggtgtcacctgaactgggcccccaaggatggggtgcgggcagtaccgcaggaagaggagcagcccctgtgaagattgagagctgccagaggctctgtgattggctgcggcacgatgacccgcgcacggattggctgcttcgggccggggggccgggcccgggggacagaatccgcccccgaaccttcaaagagggtaccccccggcaggagctggcagaccyaggaggtgcgacagacccgcggggcaaacggactggggccaagagccgggagcgcgggcgcaaaggcaccagggcccgcccagggcgccgcgcagcacggccttgggggttctgcgggccttcgggtgcgcgtctcgcctctagccatggggtccgcagcgttggagatcctgggcctggtgctgtgcctggtgggctgggggggtctgatcctggcgtgcgggctgcccatgtggcaggtgaccgccttcctggaccacaacatcgtgacggcgcagaccacctggaaggggctgtggatgtcgtgcgtggtgcagagcacsgggcacatgcagtgcaaagtgtacgactcggtgctggctctgagcaccgaggtgcaggcggcgcgggcgctcaccgtgagcgccgtgctgctggcgttcgttgcgctcttcgtgaccctggcgggcgcgcagtgcaccacctgcgtggccccgggcccggccaargcgcgtgtggccctcacgggaggcgtgctctacctgttttgcgggctgctggcgctcgtgccactctgctggttcgccaacattgtcgtccgcgagttttacgacccgtctgtgcccgtgtcgcagaagtacgagctgggcgcagcgctgtacatcggctgggcggccaccgcgctgctcatggtaggcggctgcctcttgtgctgcggcgcctgggtctgcaccggccgtcccgacctcagcttccccgtgaagtactcagcgccgcggcggcccacggccaccggcgactacgacaagaagaactacgtctgagggcgctgggcacggccgggcccctcctgccagccacgcctgcgaggcgttggataagcctggggagccccgcatggaccgcggcttccgccgggtagcgcggcgcgcaggctcctcggaacgtccggctctgcgccccgacgcggctcctggatccgctcctgcctgcgcccgcagctgaccttctcctgccactagcccggccctgcccttaacagacggaatgaagtttccttttctgtgcgcggcgctgtttccataggcagagcgggtgtcagactgaggatttcgcttcccctccaagacgctgggggtcttggctgctgccttacttcccagaggctcctgctgacttcggaggggcggatgcagagcccagggcccccaccggaagatgtgtacagctggtctttactccatcggcagggcccgagcccagggaccagtgacttggcctggacctcccggtctcactccagcatctccccaggcaaggcttgtgggcaccggagcttgagagagggcgggagtgggaaggctaagaatctgcttagtaaatggtttgaactctcaaaaaaaaaaaaaaaaaaaaaaaaaaaaaaaaa

SEQ ID NO: 15 - DNA, 1333 bp, Homo sapiens
  misc_feature (411)..(411): n equals a,t,g, or c
  misc_feature (1264)..(1264): n equals a,t,g, or c
  misc_feature (1319)..(1319): n equals a,t,g, or c
cctggaacacttcaacaaccagtatccagccgcagaggtggtgaactttggcacctggttcctcttcagcttccccatatccctcatcatgctggtggtcagctggttctggatgcactggctgttcctgggctgcaattttaaagagacctgctctctgagcaagaagaagaagaccaaaagggaacagttgtcagagaagagsmtccaagaagaatatgaaaaactgggagacattagctacccagaaatggtgactggwtttttcttcatcctgatgaccgtactgtggtttamccgggagcctggctttgtccctggctgggattctttctttgaaaagaaaggctaccgtactgatgccacagtctctgtcttccttggcttcctcctcttcctcattccagcganagaagccctgctttgggaaaaagaatgatggagagaaccaggagcactcactkgggaccgagcccatcatcacgtggaaggacttccagaagaccatgccctgggagattgtcattctggttgggggaggctatgctctggcttctggtagcaagagctctggcctctctacatggattgggaaccagatgttgtccctgagcagcctcccaccgtgggctgtcaccctgctggcatgcatcctcgtgtccattgtcactgagtttgtgagcaacccagcaaccatcaccatcttcctgcccatcctgtgcagcctgtctgaaacgctgcacattaaccccctctacaccctgatcccagtcaccatgtgcatctcctttgcagtgatgctgcctgtgggcaatccccctaatgccatcgtcttcagctatgggcactgccagatcaaagatatggtgaaagctggcctgggagtcaacgttattggactggtgatagtaatggtggccatcaacacctggggagttagcctcttccacctggacacttacccagcatgggcgagggtcagcaacatcactgatcaagcctaacgccaagtgtacaaactggcccaaccacaggagctgccagtatccagcagtatctggaccacaggcaaagaaaaccactaggaccaccaggagcacacaaccccagacccacgccggagggcatccctccaccagaagattccgccacctcaagtgaactgcaggaatcctccaacaaccacaaacacatgcttcgctgttagtgtcttcttcctgccctcagcaccacagctcaagaaaacctaaagtttcaatacaanccataggctcacaaaaaaaaaaaaaaaaaaaaaaaaaaaaaaaaaaaaaaaaaanaaaaaaaaaaaaaa

SEQ ID NO: 16 - DNA, 751 bp, Homo sapiens
  misc_feature (1)..(1): n equals a,t,g, or c
natcattttctgtcccctcctatcttaggctgaccggttccctgatgtgttacctgcttctgctactgatccaaactgcagaacttctcattcatccccaaggcctccaggcagtatccaatggggaatcagctctaaaaggaaccagaccaacgttttccagccccttcattctggtgactgaggggaggaaagaatgggagggggtattcttgtctagtggatggaaaggaaacacactgtcaaattactatatctccttggttttctattacagtagaattctccagccatatttttattgtctatgggggaagttggagatggtgaccttgattagaagtgtctggagggggataaatggaggggataagattcagttggttttggaaaatgttaaagtcttaaaataatgcgtccatctgaagaattttttctaaaaccagagtttataaaaatatcactgatacagcctgccccctcatttccctgccacaggagatgtcttggactagagacacttgtttaataatagcttgtctctgatattcccagtagcttccctctgtgtgaggaaaggatagaaatgttcaggacatcatcatacaggctcctcatctacaaagttccagtagcagtgacgcctacacggaagacttggaactgcaaacaggctggggtcacctcagtgacatctgacgctgtccaaccagaagttcgatttttgttctgggggtgaaggaggaaacag

SEQ ID NO: 17 - DNA, 1003 bp, Homo sapiens
  misc_feature (990)..(990): n equals a,t,g, or c
  misc_feature (1002)..(1002): n equals a,t,g, or c
aattcggcacgagttcctctcctcctgttttgctacattctcctcagtggcaaaaagtttcactctacctctgacagcatgtatattgcaccagtagctaacaaaaactggtctagtcaaaccaaatgggcacaaaagaaccaggataccaaaagttaagctcatacagctgcaaaccatatcacttcttggtaacaatgcagacctcataaacctaaagaagagaaagaaaagaaaacttttgttactttccttttttgcttgtcacttatatacaggctatgtgagaatataatttgtaggtataacacattaagaaaaagttatcttcattggatagaattgaatggtggtcgctgataggaatagggcgtcctctagctcttatctctgtctcttactcttttctctttctctttttctctgtcatgagactgtgtgtgacagggccacctgtctttttttttttcttaaatttttttttctttttatgtgtaggtgcatgtcttggggatttaaaaatttcaaggctggtttacttatgcaaagcatgcctacgtctggaatacttagggaaagaaagcgactccatgttgtccgaattcctcaagggacagaaaaaaaattggagactgttgaaatgcagatttgaagtaatttttttaaaatattattttgggttctgcgacattgtgaaaaattaaagttgttgtgcaatacttaattcagacatgtaccacaagttaatggtagactaacactggggggtggggtctaggcatcatgcttttgtcagcatactcttgagcttttaagtctactatgtctgaactgtggtttcttgtttatccttttttccttagttggactgtaatgtatggtctgtcaacctgtgaatctttaaagtatgattcaggtattgttgtattctttactgtgtaataaaaaagttgaaaaaaaaaaaaaaaaaacccaagggggggcccggtncctttccccctnt

SEQ ID NO: 18 - DNA, 796 bp, Homo sapiens
  misc_feature (748)..(748): n equals a,t,g, or c
tcggcccgagaagaaatgtgacgcactctcaccaagatgctgaagctgacattcatcaataagcagctgtgcatccactaggcatttggtaaatgttaacttatctaccgaggtggtgttttcttagcctcccacctccttgctgtggagcagcttcatgtaccatgatgcatattcagatcattcttaatactcatattttgatagagaggtttttaggttttcttttaaaccaagtttattgagataaactactttggtaggatatggaacttaggaataatggtatgaaactagacagcttttttttttttattacactttaagttctgggatatgtgttcagaacatgcaggtttgttacataggtatacacgtgccatggtggtttgctgcacccatcaacctgtcatctgtattcggtgtttctcctaattctatcccwcccctacccccctgcccccaaaaaggccccagtgtgtgatggtcccctccctgtgtccatgtgttctcattgttcaactcccacttatgagtgagaacatgaggtgtttggttttttcttcctgtgttagtttgctgagaatgatggcttccagcttcatccatgtccctkcaaaggacatgaactcagtccttttttatggctgcatagtatttcgtggtatataagtgccacattttctttatycagtctaycatttgggttggttccaaatctttgctattgtgaatagtgccgcaatanacatacgtgtgcatgtgtctttaaaaaaaaaaaaaaaaaaaactcgag

SEQ ID NO: 19 - DNA, 1624 bp, Homo sapiens
ggcacgaggtcgccgccgcggccgcctggaattgtgggagttgtgtctgccactcggctgccggaggcgaaggtccctgactatggctccccagagcctgccttcatctaggatggctcctctgggcatgctgcttgggctgctgatggccgcctgcttcaccttctgcctcagtcatcagaacctgaaggagtttgccctgaccaacccagagaagagcagcaccaaagaaacrgagagaaaagaaaccaaagccgaggaggagctggatgccgaagtcctggaggtgttccacccgacgcatgagtggcaggcccttcagccagggcaggctgtccctgcaggatcccacgtacggctgaatcttcagactggggaaagagaggcaaaactccaatatgaggacaagttccgaaataatttgaaaggcaaaaggctggatatcaacaccaacacctacacatctcaggatctcaagagtgcactggcaaaattcaaggagggggcagagatggagagttcaaaggaagacaaggcaaggcaggctgaggtaaagcggctcttccgccccattgaggaactgaagaaagactttgatgagctgaatgttgtcattgagactgacatgcagatcatggtacggctgatcaacaagttcaatagttccagctccagtttggaagagaagattgctgcgctctttgatcttgaatattatgtccatcagatggacaatgcgcaggacctgctttcctttggtggtcttcaagtggtgatcaatgggctgaacagcacagagcccctcgtgaaggagtatgctgcgtttgtgctgggcgctgccttttccagcaaccccaaggtccaggtggaggccatcgaagggggagccctgcagaagctgctggtcatcctggccacggagcagccgctcactgcaaagaagaaggtcctgtttgcactgtgctccctgctgcgccacttcccctatgcccagcggcagttcctgaagctcggggggctgcaggtcctgaggaccctggtgcaggagaagggcacggaggtgctcgccgtgcgcgtggtcacactgctctacgacctggtcacggagaagatgttcgccgaggaggaggctgagctgacccaggagatgtccccagagaagctgcagcagtatcgccaggtacacctcctgccaggcctgtgggaacagggctggtgcgagatcacggcccacctcctggcgctgcccgagcatgatgcccgtgagaaggtgctgcagacactgggcgtcctcctgaccacctgccgggaccgctaccgtcaggacccccagctcggcaggacactggccagcctgcaggctgagtaccaggtgctggccagcctggagctgcaggatggtgaggacgagggctacttccaggagctgctgggctctgtcaacagcttgctgaaggagctgagatgaggccccacaccaggactggactgggatgccgctagtgaggctgaggggtgccagcgtgggtgggcttctcaggcaggaggacatcttggcagtgctggcttggccattaaatggaaacctgaaggccaaaaaaaaaaaaaaaaaaaaaaaaaaaaa

SEQ ID NO: 20 - DNA, 879 bp, Homo sapiens
gctgcatgctgggcgggaactaggaagcctccccaacctctggccccgtggagccctcagcctcagctgcagtggaggcacctcgggctctggggcaaccaagtgtgacaggtggctgtgcacgggcagaggtcctgtggaagatttcatgtgacgggcagaagaggaggaggaggcaggggaggaagcacatccatgaacagggctgtctgggggcagcctgggtggtcgtgaaataggactcagtggccttgagtcctcatttaggccctgatgttctttagcctgcctggcctttggcaaatcgccagcttcacgcacaacctcatttttcacctttgggtgtgggggtcagagtcgggagagcacctgcaaagccacaatgatccagacacacggcaaggtgggcacattcccatcaggctcctcggggagagcagcgcttctgtgcccgggagcagcgaaggtcacacaggaggacccgcacctcctcgtgtcggtggctccgctggtataatcaggactcacgtggtgttcctcgtgtcgtggcccttattgcagagggagcagcacaggctttcctggaagctcccctcggtcatgtggggtgactccagagarccccaccttgcgagactggaccagtccaagtggcctkgagccacarcggcctkgcagtacctkgggagggggtgatgacaggtgcacacggaggcccatgtggtctgtctggagaatgccggagatgtgaaatatgtaatcctgagtgtggcttctagaaggaaggttcgcaaagctgaatatccactcgtgctgttcccttctcacaggagattcctgtcaacgtccgattctgcctcgaaggcaggaggagtaagg

SEQ ID NO: 21 - DNA, 2849 bp, Homo sapiens
  misc_feature (1)..(1): n equals a,t,g, or c
ngggctgcaaggacctgagctcagcttccgccccagccagggaagcggcaggggaaagcaccggctccaggccagcgtgggccgctctctcgctcggtgcccgccgccatgtgggccgtcctgaggttagccctgcggccgtgtgcccgcgcctctcccgccgggccgcgcgcctatcacggggactcggtggcctcgctgggcacccagccggacttgggctctgccctctaccaggagaactacaagcagatgaaagcactagtaaatcagctccatgaacgagtggagcatataaaactaggaggtggtgagaaagcccgagcacttcacatatcaagaggaaaactattgcccagagaaagaattgacaatctcatagacccagggtctccatttctggaattatcccagtttgcaggttaccagttatatgacaatgaggaggtgccaggaggtggcattattacaggcattggaagagtatcaggagtagaatgcatgattattgccaatgatgccaccgtcaaaggaggtgcctactacccagtgactgtgaaaaaacaattacgggcccaagaaattgccatgcaaaacaggctcccctgcatctacttagttgattcgggaggagcatacttacctcgacaagcagatgtgtttccagatcgagaccactttggccgtacattctataatcaggcaattatgtcttctaaaaatattgcacagatcgcagtggtcatgggctcctgcaccgcaggaggagcctatgtgcctgccatggctgatgaaaacatcattgtacgcaagcagggtaccattttcttggcaggaccccccttggttaaagcggcaactggggaagaagtatctgctgaggatcttggaggtgctgatcttcattgcagaaagtctggagtaagtgaccactgggctttggatgatcatcatgcccttcacttaactaggaaggttgtgaggaatctaaattatcagaagaaattggatgtcaccattgaaccttctgaagagcctttatttcctgctgatgaattgtatggaatagttggtgctaaccttaagaggagctttgatgtccgagaggtcattgctagaatcgtggatggaagcagattcactgagttcaaagccttttatggagacacattagttacaggatttgctcgaatatttgggtacccagtaggtatcgttggaaacaacggagttctcttttctgaatctgcaaaaaagggtactcactttgtccagttatgctgccaaagaaatattcctctgctgttccttcaaaacattactggatttatggttggtagagagtatgaagctgaaggaattgccaaggatggtgccaagatggtggccgctgtggcctgtgcccaagtgcctaagataaccctcatcattgggggctcctatggagccggaaactatgggatgtgtggcagagcgtatagcccaagatttctctacatttggccaaatgctcgtatctcagtgatgggaggagagcaggcagccaatgtgttggccacgataacaaaggaccaaagagcccgggaaggaaagcagttctccagtgctgatgaagcggctttaaaagagcccatcattaagaagtttgaagaggaaggaaacccttactattccagcgcaagggtatgggatgatgggatcattgatccagcagacaccagactggtcttgggtctcagttttagtgcagccctcaacgcaccaatagagaagactgacttcggtatcttcaggatgtaactggaataaaggatgttttctgttggacatgtactgaaaattaacacatgtagtagccttaaaattttagacttctcgaacatgaggctgttacagtaatttttttaacactgtgcattgtacttttctaccttaaaaaaatcagtgaggatatttatttaatgaacatcaattccttttaaattttcttagagaaatttctctgtggctcagttttaccacccataaagcggagacagtaatttatggttatcctttctgacccacaaagtatgaaaagttctgtaatctgtaaactcagttctgtaatctgtattattgagatgattaatataaagttgtattttcactgaaactgattgtcattgctgagttatgctatggtgatactttcacgcgggctataattttatgacaaggcatctgttacttcagctggccataaagtgccctcaacactgctgtgcagaccatcaccaccattcatctccagaattggtactcagtaccaaactgcaaactatagcgattcaaacaacagtgctccccaatttcaccactaccacgagcccatgacatctactatatatcatactgagtctgagaaagcgatgtaaccacaatagacacaaaccagacaatacgaaagaataaatacacgactccaccgaagcaacacaacacccagaagatcaaacaagactatgcgccaccacaccacccaaacagcaggaacaaagagaacctaagaaaaacaccacaaacaagaatctacacaacaaacgcaacatcaacaagatagccaaggatagactacacaaaaagccatagaggaacctcggactggtcaccaagagcagaacaaccgacaacacacaatacagtacaaacaagacaaacgctggacaagcgagtaaaaagatgaagaaaaaacgaagaatcaacaacaggagaagtatatgaaaacaacaccaacgcaagaacacaacagtctgaacgacagagacaaatactaaaacgacaaacgtcagctactattaaccgaaaaa

SEQ ID NO: 22 - DNA, 755 bp, Homo sapiens
  misc_feature (1)..(1): n equals a,t,g, or c
  misc_feature (733)..(734): n equals a,t,g, or c
natttcccgttcagttattccggtgacactatagaaggtacgcctgcaggtaccggtccggaattcccgggtcgacccacgcgtccgaactcctgaaacagtgaggacatctcacagaccagacaggagctggggctctgcatctcacagcggtgcctgtcagacaggaagaagtcccgcagaagtggcgtgtgggtcagggcctgcacgatgcagttcatgaagcatgtgttcccaaggttgatcagcccacgcagacctatggtgcagttcgaggtgatctttctccttttcgggttgtgcttcagcagttcaagctcccgtttggttggttcccaagttgaaaacttctctccaacgccttgcattttccaagcttttcgctgctcctccttggcgattatttccatgtctttgtcatagatgtagtcctggcacagaaaacagtagatgcctccgtacatcagatcaatggccaggttgtgccgcttcgccttcgcatgctcgtgaatatgcttctttgtgaaacagccgaagaagacacagtagaggcaggaatgcagcctgttgaggtggacgccacagacatggcagatacaggacttggccttgcgcttgcgggcctcagccgtgccgctccacacgaagcactggtagatggcccgcaggttctgcttccagttgtccaccttgaagctgcccaggtgcgagcagcccggcggcgctaccgccnnctcggcgtccatggcctcgcc

SEQ ID NO: 23 - DNA, 4129 bp, Homo sapiens
ccacgcgtccgctttttctcaggatgaatattttcctggccgactcattgatccttggtacaaataaacttctggaagacccagagagaggaaaacacaggagaaattgagcgatgtacgtacatcaaataccactactcctcagcaaccatccccaggaacctcactttcaatatcacgaagaccatccgtcaggatgagtggcatgccctacacctgcgcagaatgacggctggcttcatgggcatggcggtggccatcatcctctttggctggatcatcggcgtgctgggctgctgctgggaccgaggccttatgcagtacgtggcaggctgctcttcctcatgggagggaaaacagtggaattaaagagtgtctgccccagcccggcagggtgaagtaggatggggaaaacgttctcaccagaccctgggacttctatgctgcagcatcgtgacctgaggggtggatgcagttgccacagctctttgaggcaaaggccccgatgctctgtggacagcctcaggcttgggatggatttggcagtgaggaacttattgtaacagaagaaagtcatccaagatgcctgaggaaagaaaccttcaattgagccagccggctggaaaatgtggccaagaaaaccgcagagaccaatgttcggaggagaaaaccagaaagaggggcctgcctggcccctttgatcctttatggccgattccgtggacattgctgctcctcacgccggcagcctctcttgagtacctcaattgcagtctccagaccctcaccccgcaggcattcctgggtcggtgtcccagtcggtcacagtcatggatcctctgcagagcagtagaaagtcgggaggggcccgtgcccatggtcaggaaaggagcggcaggaggaaagaggagcatgagaactcagaagaaattgtacctactcagatgtggagtgaggatagacgttcccagattcaaaggcatcatgaagtgtcatgacaagatagaaaagactttgggctggccaagaaggaactggataaaattatgagtgaggtacagcaggtgggaacagtgtcactgaaccctatcaacagcagagcatgagaacgtgaattcctgctgctggggaggcaatgaaatgatatgggccttcagatgtctatgaatcctgacccaccgtgggtgccagttttcaagagggcttcccatcaaatattgtgcgcaaaggatggatggatgaaaggaagagtgagccaataaacgagggaacgccgggaaaggcagcctcaagccggtgggccctggcacccccaccgtccctgagcatcgagccggttcccgccccggcccgaactggcccgcgcgcgctcgcagccccgcggcggaacccgagggcggcggcagcggttccttgaacgagccggggaatctggagggagcacacaggaaaggcagagccgcgagctggaccagccgtgcaaatctctagaagatgacggtgttctttaaaacgcttcgaaatcactggaagaaaactacagctgggctctgcctgctgacctggggaggccattggctctatggaaaacactgtgataacctcctaaggagagcagcctgtcaagaagctcaggtgtttggcaatcaactcattcctcccaatgcacaagtgaagaaggccactgttttctcaatcctgcagcttgcaaaggaaaagccaggactctatttgaaaaaaatgctgcccgattttacatttatctggcatggatgtgactattgtaagacagattatgagggacaagccaagaaactcctggaactgatggaaaacacggatgtgatcattgttgcaggaggagatgggacactgcaggaggttgttactggtgttcttcgacgaacagatgaggctaccttcagtaagattcccattggatttatcccactgggagagaccagtagtttgagtcataccctctttgccgaaagtggaaacaaagtccaacatattactgatgccacacttgccattgtgaaaggagagacagttccacttgatgtcttgcagatcaagggtgaaaaggaacagcctgtatttgcaatgaccggccttcgatggggatctttcagagatgctggcgtcaaagttagcaagtactggtatcttgggcctctaaaaatcaaagcagcccactttttcagcactcttaaggagtggcctcagactcatcaagcctctatctcatacacgggacctacagagagacctcccaatgaaccagaggagacccctgtacaaaggccttctttgtacaggagaatattacgaaggcttgcgtcctactgggcacaaccacaggatgccctttcccaagaggtgagcccggaggtctggaaagatgtgcagctgtccaccattgaactgtccatcacaacacggaataatcagcttgacccgacaagcaaagaagattttctgaatatctgcattgaacctgacaccatcagcaaaggagactttataactataggaagtcgaaaggtgagaaaccccaagctgcacgtggagggcacggagtgtctccaagccagccagtgcactttgcttatcccggagggagcagggggctcttttagcattgacagtgaggagtatgaagcgatgcctgtggaggtgaaactgctccccaggaagctgcagttcttctgtgatcctaggaagagagaacagatgctcacaagccccacccagtgagcagcagaagacaagcactctgagaccacactttaggccaccggtgggaccaaaagggaacaggtgcctcagccatcccaacagtgtcgtcagagggtccccagggcattttcatggcaagtacccctctgcccccactccagcagtgcttcccaaagtgtgctctgtcacctgctttgcaatcggcttccattagcgcatgttttattttggtgtgacggttggccctcctaaacacggactttcctcaggctggttcaagacggaaaaggactttcttctgttttcttccaaagtgcaaccacagtggagagcccacggtgggcttagcctgcctaggcccttccatttctcttctttgaccgtgctaggaattccaggaaagtgcattcctgccctggtgaccttttcctatgtctaggctcctccacaggtgctgctattttgtgagctccggctcctgtttagcttttatttcagttctaacctcagtccagaaacatatgtgaggttgtttccctcttcagccacggctacaataccggaaaatgctagtttttatttatttttttaagtagtgcttcctaaatggtttgcatgagagccacctggggtacatgttgaaaacttatttggggtctaccccaaacctaataacccaaatttggggatggggcccaggaatatgcatttttaaaaagtcatctgcccttcccaggtgattctgtaagttgtccctcaactgtacttggagaaatcgtgttttaaagcagtagtccacaaagtattctgctcatgtgcccccaaaagtattttgaaaaatcatgtataccctcacccatctaagttgatatctaaaattttatctaagttggtatctaaaatttttcatgggaagttaaatagttgacaaagtatgtatttgctggtgtcgtgtaaatattggtattttaaaataaaaactgttacatcactattttaaacatatccagtacaatttaaatatcacaacaatttgacacccttcattcatttataaaaataaatgagctagttctttagtagttaaacatttcaaattggcttttctccttctgtatttccataccacttttcagccaagaatcctatcataatgtaatctattatgcccgacatctttttaatcaattcaccccattacttcttgtcaacaaaaaatataaatggaaattttttttttagctcttgctttaagtgtttgtttgttatctcagtccagaaccaatattatcgtaattaattattggtatataatgaaaacggtattaattcttggatgattaaaagtttttttattagaatgttaaaaaaaaaaaaaaaaaaaaaa

SEQ ID NO: 24 - DNA, 1674 bp, Homo sapiens
  misc_feature (1649)..(1649): n equals a,t,g, or c
  misc_feature (1663)..(1663): n equals a,t,g, or c
  misc_feature (1665)..(1665): n equals a,t,g, or c
caagttggtacgcctgcaggtaccggtccggaattcccgggtcgacccacgcgtccggtcgaagataggttcgagacggtggatgttgcagctgatcatgcagttgggttcggtgctgctcacacgctgccccttttggggctgcttcagccagctcatgctgtacgctgagagggctgaggcacgccggaagcccgacatcccagtgccttacctgtatttcgacatgggggcagccgtgctgtgcgctagtttcatgtcctttggcgtgaagcggcgctggttcgcgctgggggccgcactccaattggccattagcacctacgccgcctacatcgggggctacgtccactacggggactggctgaaggtccgtatgtactcgcgcacagttgccatcatcggcggctttcttgtgttggccagcggtgctggggagctgtaccgccggaaacctcgcagccgctccctgcagtccaccggccaggtgttcctgggtatctacctcatctgtgtggcctactcactgcagcacagcaaggaggaccggctggcgtatctgaaccatctcccaggaggggagctgatgatccagctgttcttcgtgctgtatggcatcctggccctggcctttctgtcaggctactacgtgaccctcgctgcccagatcctggctgtactgctgccccctgtcatgctgctcattgatggcaatgttgcttactggcacaacacgcggcgtgttgagttctggaaccagatgaagctccttggagagagtgtgggcatcttcggaactgctgtcatcctggccactgatggctgagttttatggcaagaggctgagatgggcacagggagccactgagggtcaccctgccttcctccttgctggcccagctgctgtttatttatgctttttggtctgtttgtttgatcttttgcttttttaaaattgttttttgcagttaagaggcagctcatttgtccaaatttctgggctcagcgcttgggagggcaggagccctggcactaatgctgtacaggtttttttcctgttaggagagctgaggccagctgcccactgagtctcctgtccctgagaagggagtatggcagggctgggatgcggctactgagagtgggagagtgggagacagaggaaggaagatggagattggaagtgagcaaatgtgaaaaattcctctttgaacctggcagatgcagctaggctctgcagtgctgtttggagactgtgagagggagtgtgtgtgttgacacatgtggatcaggcccaggaagggcacaggggctgagcactacagaagtcacatgggttctcagggtatgccaggggcagaaacagtaccggctctctgtcactcaccttgagagtagagcagaccctgttctgctctgggctgtgaaggggtggagcaggcagtggccagctttgcccttcctgctgtctctgtttctagctccatggttggcctggtgggggtggagttccctcccaaacaccagaccacacagtcctccaaaaataaacattttatatagamaaaaaaaaaaaaaaaaagggcggccgctctagaggatccctcgaggggcccaagcttacgcgtgcatgcgacgtcatagctctntccctatagaagtngnaaagggttc

SEQ ID NO: 25 - DNA, 1503 bp, Homo sapiens
  misc_feature (6)..(6): n equals a,t,g, or c
  misc_feature (18)..(18): n equals a,t,g, or c
  misc_feature (41)..(41): n equals a,t,g, or c
  misc_feature (1501)..(1501): n equals a,t,g, or c
gtggangccgctcctganaactagtgggtcccccgggctgncaggattcggcacgagaatgaatggcaaagaaatagaaggggaagaaattgaaatagtcttagccaagccaccagacaagaaaaggaaagagcgccaagctgctagacaggcctccagaagcactgcgtatgaagattattactaccaccctcctcctcgcatgccacctccaattagaggtcggggtcgtggtggggggagaggtggatatggctaccctccagattactacggctatgaagattactatgatgattactatggttatgattatcacgactatcgtggaggctatgaagatccctactacggctatgatgatggctatgcagtaagaggaagaggaggaggaaggggagggcgaggtgctccaccaccaccaagggggaggggagcaccacctccaagaggtagagctggctattcacagaggggggcacctttgggaccaccaagaggctctaggggtggcagagggggtcctgctcaacagcagagaggccgtggttcccgtggatctcggggcaatcgtgggggcaatgtaggaggcaagagaaaggcagatgggtacaaccagcctgattccaagcgtcgtcagccaacaaccaacagaactggggttcccaacccatcgctcagcagccgcttcagcaaggtggtgactattctggtaactatggttacaataatgacaaccaggaattttatcaggatacttatgggcaacagtggaagtagacaagtaagggcttgaaaatgatactggcaagatacgattggctctagatctacattcttcaaaaaaaaaaattggcttaactgtttcatctttaagtagcattttgctgccatttgtattgggctgaagaaatcactattgtgtatatactcaagtctttttatttttcctcttttcataaatgctcttggacattattgggcttgcagagttcccttattctggggattacaatgcttttatcgtttcaggcttcattttagcttcaaaacaagctgggcacactgttaaatcatgattttgcagaacctttggttttggacagtttcatttttttggatttgggatagattacataggagtatggagtatgctgtaaataaaaatacaagctagtgctttgtcttagtagttttaagaaattaaagcaaacaaatttaagttttcttgtattgaaaataacctatgattgtatgttttgcattcctagaagtaggttaactgtgtttttaaattgttataacttcacacctttttgaaatctgccctacaaaatttgtttggcttaaacgtcaaaagccgtgacaatttgttctttgatgtgattgtatttccaatttcttgttcatgtaagatttcaataaaactaaaaaatctattcaaaacawwaaaaaaaaaaaaaaaaaaaaaaaaaaaaaaaaaaaaaaaaaaaaaaaaaanaa

SEQ ID NO: 26 - DNA, 742 bp, Homo sapiens
  misc_feature (707)..(707): n equals a,t,g, or c
  misc_feature (724)..(724): n equals a,t,g, or c
  misc_feature (726)..(726): n equals a,t,g, or c
gcgctcgagaatagtgggtcccccggrctgcaggattcggcacgagctcacttcaatycttctttgagaagtttttcctttctccgcaaccagatgtacatatttgaactctctttgtacttggagggcacttctttcgtggtagttcttttatttttattaatctctgtatccttagatagtcctccaacaaccaaaggttgggactctgtcttacatatctgggtgcccctcatagtgcagtaataagtaagttgattatatacgagctatgtaacttatattttttaatggttggatatcactgagtttttttttttaagaatttttttattgaggtaaacttcacataacataaaattaactattttaaagtgagaagttcagtgccacttagtattgttaacaatgttgcataaccaccacctttatttaaagttccaaaaaaaatgttctcctctaaaaggaaaccccatcccattaagcagatactctccattccttccttcctccagcccccagcaaccaccaatctgctttctgtctctatggatttatctattcttgctattttatataaatcgaattgtatgagaccttttgtgtctggcttctttcacttagtacaagtttttgagatttatttacatagtagcatgtatcaacacttcatttttatggccaaataaaattgtattatgtgtttntagcacaaaaaaaaaananaaaaatgaccctcgag

SEQ ID NO: 27 - DNA, 2005 bp, Homo sapiens
ggttgctggcccaggtgagcgggcgcgctggtccaggtgagcgggcgcgtccccgcgacggcgctgcctgcccgaggcggttcacgtaaagacagcgagatcctgagggccagccgggaaggaggcgtggatatggagctggctgctgccaagtccggggcccgcgccgctgcctagcgcgtcctggggactctgtggggacgcgccccgcgccgcggctcggggacccgtagagcccggcgctgcgcgcatggccctgctctcgcgccccgcgctcaccctcctgctcctcctcatggccgctgttgtcaggtgccaggagcaggcccagaccaccgactggagagccaccctgaagaccatccggaacggcgttcataagatagacacgtacctgaacgccgccttggacctcctgggaggcgaggacggtctctgccagtataaatgcagtgacggatctaagcctttcccacgttatggttataaaccctccccaccgaatggatgtggctctccactgtttggtgktcatcttaacattggtatcccttccctgacaaagtgttgcaaccaacacgacaggtgctatgaracctgtggcaaaagcaagaatgactgtgatgaagaattccagtattgcctctccaagatctgccgagatgtacagaaaacactaggactaactcagcatgttcaggcatgtgaaacaacagtggagctcttgtttgacagtgttatacatttaggttgtaaaccatatctggacagccaacgagccgcatgcaggtgtcattatgaagaaaaaactgatctttaaaggagatgccgacagctagtgacagatgaagatggaagaacataacctttgacaaataactaatgtttttacaacataaaactgtcttatttttgtgaaaggattattttgagaccttaaaataatttatatcttgatgttaaaacctcaaagcaaaaaaagtgagggagatagtgaggggagggcacgcttgtcttctcaggtatcttccccagcattgctcccttacttagtatgccaaatgtcttgaccaatatcaaaaacaagtgcttgtttagcggagaattttgaaaagaggaatatataactcaattttcacaaccacatttaccaaaaaaagagatcaaatataaaattcatcataatgtctgttcaacattatcttatttggaaaatggggaaattatcacttacaagtatttgtttactatgaaattttaaatacacatttatgcctagaaggaacggactttttttttctattttaattacacataatatgtaattaaagtmcaacataatatgttgtttctctgtagcccgttgagcatatgagtaagtcacatttctattaggactacttmcaaggacaaggtttccatttttccagttgtaaaattggaaccatcagctgataacctcgtagggagcaaccccaggatagctaagtgttatgtaatatgcctagaaggtgatgtgaatgcgattcagaagcatagccactcccattttatgagctactcacatgacaaatgtcatcttttgctataacctttgccaagttagagaaaagatggatttaatgagataaatgaaaagatatttamcctaatatatcaaggcactatttgctgttatgctttgttatttatttcccagcacttgttccttattgtagattttttaaagactgtaaccttttactaactgtggtcttactaaaatttgtgcttgatactgcttttcaaaaagcctttaattagagccaaaaggatggaaaaggcaagatataaatgccttttatagatctcttatttacattgaaaattattaccatatgtttagagcaaatccaagaaaacttcaacagcttctgaagatgtctatgaatgttgaaaacttttcaatstcttggratgctcakttaattcgcagaccggcttaacggattaaacgccccccccc

SEQ ID NO: 28 - DNA, 1153 bp, Homo sapiens
ggattaaggtgtggtccctggaccatgcccaacggcataggcagcacttgaaaactggctaaaaacgcagactctcaggccccgggccagagctactgaatcaaaatctgcatgawcacaggagcagccctctggcccataatgacggccctgtcttcgcaggtggccactcgggcccgcagccgctgggtaagggtgatgcctagcctggcttattgcaccttccttttggcggttggcttgtcgcgaatcttcatcttagcacatttccctcaccaggtgctggctggcctaataactggcgctgtcctgggctggctgatgactccccgagtgcctatggagcgggagctaagcttctatgggttgactgcactggccctcatgctaggcaccagcctcatctattggaccctctttacactgggcctggatctttcttggtccatcagcctagccttcaagtggtgtgagcggcctgagtggatacacgtggatagccggccctttgcctccctgagccgtgactcaggggctgccctgggcctgggcattgccttgcactctccctgctatgcccaggtgcgtcgggcacagctgggaaatggccagaagatagcctgccttgtgctggccatggggctgctgggccccctggactggctgggccacccccctcagatcagcctcttctacattttcaatttcctcaagtacaccctctggccatgcctagtcctggccctcgtgccctgggcagtgcacatgttcagtgcccaggaagcaccgcccatccactcttcctgacttcttgtgtgcctccctttcctttccctcccacaaagccaacactctgtgaccaccacactccaggaggcagccccatccccttccagcccctaagtaggccctcccctccctaaatctgcttccgcaccacctggtcttagccccaaagatgggccttctctctcccagataagttggtcctccctctgcctttcctctcaagcccccaaagagcaaaggcaacagcaagaccagcgggttcttgcaacactgtgaggggcagccagggcggccccaataaagcccttgaatactttraaaaaaaaaaaaaaaaaaaaaaaaaaaaaaaaaaaatgaccctcga

SEQ ID NO: 29 - DNA, 812 bp, Homo sapiens
  misc_feature (17)..(17): n equals a,t,g, or c
  misc_feature (108)..(108): n equals a,t,g, or c
gaccatttttagccaancttggaattaaccctcacttaagggaacaaaagctggagcttccaccgcgttggcggccgctctagaactagtggatcccccgggctgcangaattcggccacgagaggacttccccacctcatgcagctatttgggccgtggcgtctgaaatttattatttcagagtcacccctttratgaccttggcagtgractgcagtcatctgtttaggcctttccatggcccacgtcaatgccgttatttctgtttgttgcacatttgatttccttgttgttggcatttagaaggccccctgcttcccagatcacaccacgggcatggaccacagagattgcatcttgtgagtctgtagaaatggtcaaggccttgtcctctcttaggtccagagctcaggtgaatgcagattttcccggccatctgtgctgaagtccctgtggggaggctcctggctggtttcctgtaggtagacagctacacgtcctgcccttcattggcttcttttcatgaagctcctgccatctacaaaacatgtctcccttcttgaatcacatctctgttattgaagctctggaagtcaaccgggcgtggtggctatgcctataatcccagcattttgggatgccggggcgggtggatcacctgaggtcaggagttcgggaccagcctggccaacatggcgaaaccccgtctctaatacaagtgcaaaaattggccaggcgtggtggtcactgtgctccagcctgggtgacagagcgagctccgtctcaaaaaaaaaaaaaaaaaaaactcgag

SEQ ID NO: 30 - DNA, 910 bp, Homo sapiens
ggcagagctggccttcgactcgctatgtccactaacaatatgtcggacccacggaggccgaacaaagtgctgaggtgaggaccccagcgtcgtgggcacgggttcgggttgtgggtgtggatcggggccctgggaagcgcctgtctatcccgggggcaggacctgagcgcccctgaccctcgagcctgtcgcaggtacaagcccccgccgagcgaatgtaacccggccttggacgacccgacgccggactacatgaacctgctgggcatgatcttcagcatgtgcggcctcatgcttaagctgaagtggtgtgcttgggtcgctgtctactgctccttcatcagctttgccaactctcggagctcggaggacacgaagcaaatgatgagtagcttcatgtgagacttgccctacagaacaagtgactcttgagtaaggggtggggggaccccagcctggccatcctagactgacacctctctcctgtcttcatgctgtccatctctgccgtggtgatgtcctatctgcagaatcctcagcccatgacgcccccatggtgataccagcctagaagggtcacattttggaccctgtctatccactaggcctgggctttggctgctaaacctgctgccttcagctgccatcctggacttccctgaatgaggccgtctcggtgcccccagctggatagagggaacctggccctttcctagggaacaccctaggcttacccctcctgcctcccttcccctgcctgctgctgggggagatgctgtccatgtttctaggggtattcatttgctttctcgttgaaacctgttgttaataaagtttttcactctgaaaaaaaaaaaaaaaaaaaaaaactygrgggggggcccggaacccaattcsccggatagtgagt

SEQ ID NO: 31 - DNA, 821 bp, Homo sapiens
gttttgagtgtgtgaattacatatatgaacatctgaraaaatcctataagcagtttaatcaactgttccactccactccaagtgagtccataggcagaattgagttatggggagagcggcctagtaataattggtttgcgtaatacaaagttctactgggtagtgatgttgtagaagttcatatagaatcagctgagctttcagaaatggtgaaagggtggtaatagtcataacttagattgtaatttttttcccataggcttttaaaaaatattcatgaggttctttttttatttcaatagtttttggggaacaggtggtttttggttacatgataagttcttcagtggtgatttctgagattttggtgcacctgtcatgtgagcagtatgaactctactttatgtgtagtcttatccctcatgtgtatgaactccaccttatgtgtagtcttatccctcacccactcctgcccttccccacaagtccccaaagtccattatatgatctttatgcctttacatcttcacagtttagctctcacacaacttattataatttataagtaagccagcattggatatagttgtattccattattaatttaagaaaccttatgcaagtaattattagtcatcatcccaaaaaaaagggagaacagggttagattcagaatactttgataagagctaaatactatcatgagtgctgtcagtctgtagtaactttccattggtattctatgtcttttaggcttacagatactttttacactcttacaaaatgtgcacaagaagaagctgcagctcagagctcgtgcc

SEQ ID NO: 32 - DNA, 981 bp, Homo sapiens
acggaagcgcagagcacggaccccgccccctcgcggccccgctcgtgacgtcgcggggggcgccggcctccgcccggccccgagggcaggctctccccggaggctcagccccctctgctccccatgggcaactgccaggcagggcacaacctgcacctgtgtctggcccaccacccacctctggtctgtgccactttgatcctgctgctccttggcctctctggcctgggccttggcagcttcctcctcacccacaggactggcctgcgcagccctgacatcccccaggactgggtctcttttttgagatcttttggccagctgaccctgtgtcccaggaatgggacagtcacagggaagtggcgagggtctcacgtcgtgggcttgctgaccaccttgaacttcggagacggtccagacaggaacaagacccggacattccaggccacagtcctgggaagtcagatgggattgaaaggatcttctgcaggacaactggtccttatcacagccagggtgaccacagaaaggactgcaggaacctgcctatattttagtgctgttccaggaatcctaccctccagccagccacccatatcctgctcagaggagggggctggaaatgccaccctgagccctagaatgggtgaggaatgtgttagtgtctggagccatgaaggccttgtgctgaccaagctgctcacctcggaggagctggctctgtgtggctccaggctgctggtcttgggctccttcctgcttctcttctgtggccttctctgctgtgtcactgctatgtgcttccacccgcgccgggagtcccactggtctagaacccggctctgagggcactggcctagttcccgacttgtttctcaggtgtgaatcaacttcttgggccttggctctgagttggaaaaggttttagaaaaagtgaagagctggaatgtgggggaaaataaaaagcttttttgcccaaaa

SEQ ID NO: 33 - DNA, 864 bp, Homo sapiens
  misc_feature (28)..(28): n equals a,t,g, or c
  misc_feature (706)..(706): n equals a,t,g, or c
  misc_feature (745)..(745): n equals a,t,g, or c
  misc_feature (748)..(748): n equals a,t,g, or c
  misc_feature (757)..(757): n equals a,t,g, or c
  misc_feature (765)..(765): n equals a,t,g, or c
  misc_feature (772)..(772): n equals a,t,g, or c
  misc_feature (781)..(781): n equals a,t,g, or c
  misc_feature (813)..(813): n equals a,t,g, or c
  misc_feature (840)..(840): n equals a,t,g, or c
  misc_feature (842)..(842): n equals a,t,g, or c
gagaagacgacagaagggtacggctgcnagaagacgacagaaggggaccctccgcctggacgcagcagccaccgccgcgtccctctctccacgaggctgccggcttaggacccccagctccgacatgtcgccctctggtcgcctgtgtcttctcaccatcgttggcctgattctccccaccagaggacagacgttgaaagataccacgtccagttcttcagcagactcaactatcatggacattcaggtcccgacacgagccccagatgcagtctacacagaactccagcccacctctccaaccccaacctggcctgctgatgaaacaccacaaccccagacccagacccagcaactggaaggaacggatgggcctctagtgacagatccagagacacacaagagcaccaaagcagctcatcccactgatgacaccacgacgctctctgagagaccatccccaagcacagacgtccagacagacccccagaccctcaagccatctggttttcatgaggatgaccccttcttctatgatgaacacaccctccggaaacgggggctgttggtcgcagctgtgctgttcatcacaggcatcatcatcctcaccagtggcaagtgcaggcagctgtcccggtatgccggaatcattggaggtgagtccatcagaaacaggagctgacaacctgctgggcaccccgaagancaaagccccctggcagcttaccgggcccaagcctctggnatncccttgaanagcctggncagagangggaagacnccgatgatgaacttggacccagggttgccggncccagggctcctacttccccaaacctngnccggcccttgaaggttacctgg

SEQ ID NO: 34 - DNA, 1038 bp, Homo sapiens
  misc_feature (2)..(2): n equals a,t,g, or c
gnaattcggcacgagttaatgtataaaatatttctataatgaattttaatgggaattagagcatcatagaaaaaatgctcttactgttgaaaacattatttgttacattttggtcaactaatctttcaataacttttagtaactataatgttaagttgtaccagtggcagtcttatatagtaaatggcagctgacagcatgaaaataacatatctaatattttgtgactatcttattaggaaaatcagagaatttcaaaaccttgttagtttttagggtatagtcacattttataaatgtgcggtatatttatacatgatttgacgtttgtgwaaatattttccctggacttttattttagatgagatctacagtgtaggcaaacttatataatctgtcaactccattagtgtcatagtcagactcatccccatgctaaaattatagttgtkaaaatacgcttttgtaaatagttgtgttaggtcattatcaccaagtcttcaaggkattacattataaaaaccttggkttttattcttgtgaatamccgttttttccatgcaaagttaaaattcttcagcctttaatttttttattaatatataaggatgtgatgagtatgactacaaaacaggaaaaaataaacagatttcgtttgtggcttttgctaaattgttacctgacaaaatcttagccagttcttcattttcgttttgagatgaagatacttagttttagtccaggggctgggcgcgatagctgatgcctgtggtcccagtgctttgcggggccgaggcaggtggatcacttaaggtcaggagtttgagaccagcctgcccaacatggtgaaacgttgtctctactaaaaatacaaaaattagacaggcgtggtggcacacatctgtaattccagctactcaggaggctaacacaggaaaattccttgaacctgggaggcagaggttgcagtgagccattgcactccagcctgggcaacacagtgagactcttgtctcaaaaaaaaaaaaaaaaactcga

SEQ ID NO: 35 - DNA, 843 bp, Homo sapiens
ggcagctgtccaccgatcccggccaccgcccccggccacccccaccccgcgagcccatggaggctccgggaccccgcgccttgcggactgcgctctgtggcggctgttgctgcctcctcctatgtgcccagctggctgtggctggtaaaggagctcgaggctttgggaggggagccctgatccgcctgaatatctggccggcggtccaaggggcctgcaaacagctggaggtctgtgagcactgcgtggagggagacagagcgcgcaatctctccagctgcatgtgggagcagtgccggccagaggagccaggacactgtgtggcccaatctgaggtggtcaaggaaggttgctccatctacaaccgctcagaggcatgtccagctgctcaccaccaccccacctatgaaccgaagacagtcacaacagggagccccccagtccctgaggcccacagccctggatttgacggggccagctttatcggaggtgtcgtgctggtgttgagcctacaggcggtggctttctttgtgctgcacttcctcaaggccaaggacagcacctaccagacgctaatctgacccctttgggcctggactccatcctgaggggaaaggaggatgcagagggtggcctctgggcacccttgtgggtaagcggggggcgggggcgggaaaaactctggccgccagtttttggctcctgcgggcaccaagcaggccaagtgtttaatgcctgacatctcctcctgtcctgggcctggaacctgcagctgagaaaatccctcaaccacctcgtctcctccatcgcccctgctgggccccccagcctgacagtgggttg

SEQ ID NO: 36 - DNA, 849 bp, Homo sapiens
gaattcggcacgaggtataatgccattctcttcctctgtgaagtgcctgttcggggtgttgctacgtttttgttttgttgtgttttctgttgtagtgtttacatttttcttgtcgattcctaagaggactttagggtactgagtcacccatggtcatgtgttgcagagaagtgtcacagagtgaaaactgtcttttccttgatactacctttagattcatatttgggaagaccttcactaatcatgactacataagtattcacttttactttcttaaggcctttttgttttcattcttttatagtaatgtctaagccatctggaattagtttgttgattatgcaagaaagggatcgaagtgctttttctgagtcattatccacatgccgaaacatttattgaatagccctttccttattgatctgaaaacaccttcttataaaaccttgcattggtttttggacttgctgtgctttcaggagtcagaagaacattcttttgattatkgtagctttacatwaataatacatttkggccgggtgcggtggctcacgtatgtaatcctagcattttgggagactgaggcaggcggaacacctgaggtcaggggttcaagaccagactggccaacatggcaaaaccccgtctctacaaaaaaaaaaaaaaaaaaaattagctgggcatggtggtgcctgcctgaaatcccagctactttgggaggctgaggcaggagaacctcttgagcctgggaggtagaggctgcagtgagccgagcttgcaccactgcactccaacttgggtaacagagtgagactccatctcaaaaaaaaaaaaaaaaaaaaaactcga

SEQ ID NO: 37 - DNA, 872 bp, Homo sapiens
  misc_feature (844)..(844): n equals a,t,g, or c
  misc_feature (858)..(858): n equals a,t,g, or c
ggggaagttcttcactgccttgcatttgactccagatccctccatcctcccagagccttggcctcaaaaatgctgattctagcatcatggaaatgctgtcctcaaagtggtctaaacgggttgctgcttcacttgctcacttaatctcccttttcatagggctgttgtttttacttctgggaagttctgtttaccctggaacagaaactctcttccctaaaagttgattttattgacccatggaggccagagacacttaggcatattttccctccagactagaagcttctgaggaggacctcctgagtctgcaccctggctccctgctgtgctgagggcccccgtgttaacctcacgttgtgcctcctctgattcagagggcccagtgtggttctgtcagccaggcagtggccccagctctacagaaatgagttgtcattgcatcctagggccagggtcttcgtgcttgtgtgtgttacgtggaagtatgtggacaccaagtgttcctggatggccacagcctgcgaaggaaactggggccagcagctgctctgtgttttcagccaacaatggctcctgcccactgccgctgcataaccaccagaggcaggcttctcttgacacaggcctgtcgttggagcatgtgcctggcgagtcctatttctattcccctgtgggttagggacaggcagctgtaccttcagtgtgttgctggggcaggagaatcgcttgaaccgggaggcggaggttgcagtgagccaaaattgcaccactgcactgcagtctgcaggacagagagaggctmtatctcaaaaaaaaaaaaaaaaaaaactcgagggggggnccgggacccaattngccatataggaaaa

SEQ ID NO: 38 - DNA, 601 bp, Homo sapiens
gctgccaggaattccggcacggggaacagtgtaatattgaagcaaatgctgtataacaaccacctggaagcccctcatgtatctctttttgaaaacactcctctctttctccactctaatgatgaccaccgccttgtcttttatggtaatcactgttctttgggttttattactgcatttattggctaatatatgcatccctagaaaatgtagttttgcctgcttttatataaatggaatattactgcatgcagtcttttgatttgtgattgttttgctctaaggcttgtaagggtcatccatgttttgcatatagtttgtttattgtcattgccatagagtaaatcattgtatgaatatactgcagtttatttactgttgacatatgtttcagttgtttttaactactaggaaatgctactctgtacattcttgtatatgtaccttggtgcacatatgtatgtttttctagagtatatacagtggcatgggattgctgaattaaaaggtttgtatatcttatactagaagataataaaaacttttcctgatggattctgccaattcaaaaaaaaaaaaaaaaaaaaaaaaaaaaactcga

SEQ ID NO: 39 - DNA, 1276 bp, Homo sapiens
gtgagtgtgtggcactggtggcctggagccaaatttagcttgggtgagagttgacaatggtagttttccttcctcaagcccctctgtgcccctagagcaccctggctgtggctgcctccttcatccaagagcagagtccatgttgggccaggagacttcagatccatgtcctggtgctgcctctggctttgtctttcctcagtgggcaggactgggtctgctggtccatctttacccttctctgagctatgcagccttggcctgctgcgtctccggcctgtattctctccccttcactcaggccctgggaaaccagcccagtttctkgcaggagaggcagaggaggtcaatgcctttgctctgggcttcctgagcaccagcagtggtgtctctggagaagatgaagtagagcccttacacgatggagttgaagaggcagagaaaaagatggaagaagaaggtgtgagtgtgagtgaaatggaggcaacaggagcacaaggacccagcagggtagaagaggctgagggacacacagaggtgacagaagcagagggatcccaggggactgctgaggctgacgggccaggagcatcttcaggggatgaggatgcctctggcagggcagcaagtccagagtcggcctccagcacccctgagtctctccaggccaggcgacatcatcagtttcttgagccagccccagcgcctggtgctgcagtcttatcttcagagcctgcagagcctctgttggtcaggcatccccctaggccccggaccaccggccccaggccccggcaagatccccacaaggctggactgagccactatgtgaaactctttagcttctatgccaagatgcccatggagaggaaggctcttgagatggtggagaagtgcctagataaatatttccagcatctttgtgatgatctggaggtatttgctgctcatgctggccgcaagactgtgaagccagaggacctggagctgctgatgcggcggcagggcctggtcactgaccaagtctcactgcacgtgctagtggagcggcacctgcccctggagtaccggcagctgctcatcccctgtgcatacagtggcaactctgtcttccctgcccagtagtggccaggcttcaacactttccctgtcccacctggggactcttgcccccacatatttctccaggtctcctccccacccccccagcatcaataaagtgtcataaacagaaaaaaaaaaaaaaaaaaaaaaaaaaaaattgggggggggcccc

SEQ ID NO: 40 - DNA, 2084 bp, Homo sapiens
  misc_feature (2075)..(2075): n equals a,t,g, or c
  misc_feature (2083)..(2083): n equals a,t,g, or c
ggcacgaggagttgtgcagatacctggctgagagctggctcaccttccagattcacctgcaggagctgctgcagtacaagaggcagaatccagctcagttctgcgttcgagtctgctctggctgtgctgtgttggctgtgttgggacactatgttccagggattatgatttcctacattgtcttgttgagtatcctgctgtggcccctggtggtttatcatgagctgatccagaggatgtacactcgcctggagcccctgctcatgcagctggactacagcatgaaggcagaagccaatgccctgcatcacaaacacgacaagaggaagcgtcaggggaagaatgcacccccaggaggtgatgagccactggcagagacagagagtgaaagcgaggcagagctggctggcttctccccagtggtggatgtgaagaaaacagcattggccttggccattacagactcagagctgtcagatgaggaggcttctatcttggagagtggtggcttctccgtatcccgggccacaactccgcagctgactgatgtctccgaggatttggaccagcagagcctgccaagtgaaccagaggagaccctaagccgggacctaggggagggagaggagggagagctggcccctcccgaagacctactaggccgtcctcaagctctgtcaaggcaagccctggactcggaggaagaggaagaggatgtggcagctaaggaaaccttgttgcggctctcatcccccctccactttgtgaacacgcacttcaatggggcagggtccccccaagatggagtgaaatgctcccctggaggaccagtggagacactgagccccgagacagtgagtggtggcctcactgctctgcccggcaccctgtcacctccactttgccttgttggaagtgacccagccccctccccttccattctcccacctgttccccaggactcaccccagcccctgcctgcccctgaggaagaagaggcactcaccactgaggactttgagttgctggatcagggggagctggagcagctgaatgcagagctgggcttggagccagagacaccgccaaaaccccctgatgctccacccctggggcccgacatccattctctggtacagtcagaccaagaagctcaggccgtggcagagccatgagccagccgttgaggaaggagctgcaggcacagtagggcttcttggctaggagtgttgctgtttcctcctttgcctaccactctggggtggggcagtgtgtggggaagctggctgtcggatggtagctattccaccctctgcctgcctgcctgcctgctgtcctgggcatggtgcagtacctgtgcctaggattggttttaaatttgtaaataattttccatttgggttagtggatgtgaacagggctagggaagtccttcccacagcctgcgcttgcctccctgcctcatctctattctcattccactatgccccaagccctggtggtctggccctttctttttcctcctatcctcagggacctgtgctgctctgccctcatgtcccacttggttgtttagttgaggcactttataatttttctcttgtcttgtgttcctttctgctttatttccctgctgtgtcctgtccttagcagctcaaccccatcctttgccagctcctcctatcccgtgggcactggccaagctttagggaggctcctggtctgggaagtaaagagtaaacctggggcagtgggtcaggccagtagttacactcttaggtcactgtagtctgtgtaaccttcactgcatccttgccccattcagcccggcctttcatgatgcaggagagcagggatcccgcagtacatggcgccagcactggagttggtgagcatgtgctctctcttgagattaggagcttccttactgctcctctgggtgatccaagtgtagtgggaccccctactagggtyaggaagtggacactaacatctgtgcaggtgttgacttgaaaaataaagtgttgattggctagaaaaaaaaaaaaaaaaaaaaaaaaactcgagggggggcnccggtacnc

SEQ ID NO: 41 - DNA, 1765 bp, Homo sapiens
ggcacgagatttctgggagtcctgcagagtctagttgccaagtggaacattcttaaaaagatcgttcagaagtttaccagaattaaaagatgctgtcttggaccagtattcaatgtggggaaataaatttggagtattgctttttctgtattctgtattactgacaaagggcattgaaaacataaaaaacgaaattgaagatgcaagtgaacccttgatagatcctgtatatggacatggcagccaaagtttaattaatctcctgctgacgggacatgctgtttctaatgtatgggatggtgatagagagtgctcaggaatgaaacttcttggtatacatgaacaagcagcagtaggatttttaacactaatggaagctttaagatactgtaaggttggttcttacttgaaatctccaaaattccctatttggattgttggcagtgagactcacctcaccgtattttttgccaaggatatggctttagttgcccctgaagctccttcagaacaagccagaagagtttttcaaacctacgacccagaagataatggattcatacccgattcacttctggaagatgtgatgaaagcattggaccttgtttcagatcctgaatatataaatctcatgaagaataaattagatccagaaggattaggaatcatattattgggcccatttcttcaagaattttttcctgatcagggctccagtggtccagaatcttttactgtctaccactacaatggattgaagcagtcaaattataatgaaaaggtcatgtacgtagaagggactgcagttgtgatgggttttgaagatcccatgctacagacagatgacactcctattaaacgctgtctgcaaaccaaatggccatacattgagttactctggaccacagatcgctctccttcactaaattaatttgtctaagtatttataaggaagatcttaataacagatgttgaaagaaggagtcaagactggcaattggctggattaagctaaacactggtatcactgattaactgtaaataacaattaaaaacacattttcagtgtttatgatatgtttaaattatttgtcctaaagctttatgttaaagattatcctattttaccccttcgtgtgaaatttactagcaaaattaagctttcatcaaagttcatcacttttgcattcagatacttggtcatttacttaccaaattacaaacgcaatactacagcatttgtatattaagtatcacagttactattgataaactacttttgggttttatttcattgaggcactttttttattgtttgaatgattccggcttgtaatatatcagcctctacaatgaaatgcagaagagttcatttttctaagatctgtttttcattagaaatattgacaaataacacattgtcaacctggatcctttgacaatttacttaactctggcatgttcacaaaaagtagaaactctaagagaccattaccatttattcacagatgtataggggatgtattctaaaaactgacagaaaagagaatctgatagtcaacactgttaacttttactgtgtaattgccaaatacacttttccaaatttgtcccaacagccctgtaagccagctttcttctatatttataaacacgataaatgcatgagaagatctgttattacattagtatattacgttatttattatgatcctagttgatggcctaaataaacacctttttctttaaaaaaaaaaaaaaaaaa

SEQ ID NO: 42 - DNA, 2494 bp, Homo sapiens
ggcacgaggagatgtttaaggattacccgccagccataaaaccatcctacgatgtgctgctgctgctgctgctgctagtgctcctgctgcaggccggcctcaacacgggcaccgccatccagtgcgtgcgcttcaaggtcagtgcaaggctgcagggtgcatcctgggacacccagaacggcccgcaggagcgcctggctggggaggtggccaggagccccctgaaggagttcgacaaggagaaagcctggagagccgtcgtggtgcaaatggcccagtgacccccagacgcggaaaccgggtggcagcgcccagcctggccccaagcatggaaacgcacaacccctaatcgccctgagctactgcttctaacacctcttttcccttgtgtgagggcaaaccaggctgcaggtggggttttcacttcctagggtagtttaattttaaaataggccaatgttggctagtctgtgcctcagtgagatcagtcagctccgagtggctcccgtgtcgtaacagcaggagcatggccgcaacttcccaggccgaggaagggcccccggctcggcctcttgagagccccacccctgaactggccccagctcctcttcctgcctctctcatggcttgggctggagtgggctctctggacctgaccagactgtgggtccctgcgtctcctgcccactctgaccgggcttcctccctccacgcttagggtctgtcccgggtactcagtcagcccagtgggatcttacccacttccctgcaaggtgcacctgccccaggctcaggctgcccagcggctcttcctggacagtgagagcagggctgggcgcctctgtcctggcccgggagccgcaggggcccctcctccagagcctgggcgcaagcgacacaggctgccgctgctctcccaggtgaaatccacaccagtccacgccgggtcgcctgccctgtctccctacttagacccagtcattctagagggatccaccgccacactggccggcccacgtcctgggtgctgtcatgcccagcttggagtgccacgtggccgctgcccacgtcccgggcactgtcatgcccagcttggagtgccacatggccgctgcccacgtcccgggcactgtcacgcccagcttggagtgccacgtggccgctgctgtgacaggcagtgttcttgggggtggggctgcatccaaggctttgtaaaccggctggaccacgtctccctggccccagtgaccgggggaagctgagcccctccctcctgtgtttgctcccattactcaaaatgcaggacagatcaggtcagagcccaggaattctcacaggttcacccagcgccctctacctcctagcaagtactttgtcttgatcctcactgagaaggccccagggcagcggtcttctccatctccgctgttttggggtcttagggtacagcccaggcggtcactgcccacctgccaggctgcagggacagttgggtgtgagaataacactggctttgggtagtgccatggccaggagtgggtttccctgcgtctcctcgtcccgagggcgcctgggtcctcccagctgacggcagtaaatccacagtgagttggggcgactgtgaaactggaatgctgttactttgataattactttccagcaggtgttttccttcacaatggttttgtttctttccttctgatctgagaagacatgaacgttttctcttcaccgccgtggggtgtattgactggtcccccatgggctgctggaaaggcccggagatgcatctgtggcctggggccatcaagatcaaagaaccaggaggcctgggagatgcagctggatggggcggcctgcagaccctgccagggggtttgaggaccctcccaggtttcccactgcggaacaggagtgactctggctgccaagataccttcatggtgttcatgacaagtggaatcattattttcaaccattgaagggggatgcaggcaagacaccttcccagctgctcctagaggggacaagccaggccctctctgcagtcctcggcagctccggaaggacacagtcaggggccgggcaaacactttggccacagccccaaacaagcgccaccgtgggagaggagaggctgctgtcactggtaccggatgcagaccccaccctgtctgcaggccacccccacctccctgcagctttgaggctggcggggtctgctcctgggaatggggtgggagccacagggacgacccggggcgggctgatgtcttcttgggggcagaccagagagctcaagtttcagagtcagaattaggcacttggagcgtttttgctggcttgcactttcttattttcttattttagagcgcttaaaaaaatccggaaaaatggggtttaaaagaactgtctctttcagtctacatttttgtttaatacgcttgagcaataaacgcttacttgcaaaaaaaaaaaaaaaaaaaaaaaaaaa

SEQ ID NO: 43 - DNA, 1509 bp, Homo sapiens
ggcacgaggatgtacctaatgagcttctccattcactttgtaaaaataatttgtatgtgtaccatcttggtcctctcccctcccgttttgttaaaatatcaggatagcactcccaggccactttggtctcagtgtaagatccctattaactatctgaaaggaaaatagagccaagacctctggtctcaaatatataggaattgcctttctttagtcttcaggactattgtgtgaaaacaagtaggggtctaatctcctagaaggtaggggctttatccttaaagagaatatgtccccagattattagcacttttagaggagaagccaaggtatgtaggggtgtgtggctggcccatcagtggagcacgaagagagaatgggataccattgtgggaagagaagaaaagttcctcaggggcctcccactgctaaagttttttgtgagatgttgatctgtgcttcctggatttgacttttaaaggaattattctggcagcacatgtagtattcttggatgatcttgctgctcttatttctccttttgtgtgtgtgtgtgtgtgtgtgtggctatgggttttcatttgtaactccatctgcttaggagagtgggctctctataagggaacctgctgtaaacttcattgcagcaaggatgtagagagaaataggacttaattccactaggggctctcatctcacaccttaaggaggagatttctagaaaaactgggccagattttctttgttctccatcattttaatgtggcaggctgttcagttttcttactcttacctatgtgatatttcttcgtaacgtgtccaaaaagaaaaaagacccaatcagtgtctcttgactttgttctttgatccctcagtttcttcttgatttcagcatgtgtcgggttcctaattttgggtatgagttagcaaatttaaccattgtgtttgtgccctacccaggggactccccagtttctgacttgaagtagactgagaagaatccacgaggtgctatctggccagatttaagtagattctatttccttggttctccctctccctgaggacctcttattttattgtcccctcttctaggttaattctcctttgatttgactttgttgagaaggaggttggacagtagattagcaaagttccaagtgcaaaattacagtgtgttagagtgtggggggaaaattagtcttatttttccctacatgggatacaacactgtgaattcaatcttcaactgaaggccctgcagttctcctaaaacatagttgtttgtttttctttaacaaagtttaagctagtgttaataaattaaaaaaaattgcttgtctgtctacttcagctttgttttatgcccatttcatattgttgtctgtgttgtaattcataacttttgataccatttctgatgtgtaaaattggttgtcttgtaaatatcttataaagagttcaattgtaaataaactattgtggctgttaaaaaaaaaaaaaaaaaaa

SEQ ID NO: 44 - DNA, 885 bp, Homo sapiens
  misc_feature (233)..(233): n equals a,t,g, or c
aattcggcacgagagggctgcatccttgcgttctgtgagctctgcccgttgggagcatccatgctgatgtgcaggggccgtgcagcactgcattcttcttgccttctctgttctgtttagtacaaccaccccagcaggtctccagttcctgccaggttagtgtggatggcccagcaccatctcctctccatcttgttggctatcctctcttgttcctcacaaccccgccaggntcgcggctcaggagctctgccgtgtgaagtgtgctcagcagttctcctcacatgtctacgcaaaatctctggctccctgtgtgtctgagcccaacagacacactgagcacaggagttggctctcagctcctcccagcttgccgtgactgagccytgccgtcctgtggcamcgccasggagaccacagtgtccaactgtccaacctttacgtaattggcatcccaggaggagaagcaagagtgaatggggcaggaaaagatcattaaagaaatcgtggctgacataaaaaaggatgagttcatgtcctttgtagggacgcgtggatgaagctggaaaccatcattctgagcaaactatcgcaaggacagaaaaccaaacaccatgtgttctcactcataggtgggaattgaacaatgagatcacttggacacagggtggggaacatcacacaccggggcctgtcgtggggtgagggggatggggcagggatagcattaggagatatacctaatgtaaatgacgagttaatgggtgtcagcacaccaacatggcacatgtatacatatgtaacaaacctgcatgttgtgcacatgtaccccagaacttaaagtataataaattaaaattaaaaaaaaaaaaaaaaaactcgtag

SEQ ID NO: 45 - DNA, 639 bp, Homo sapiens
gaaaaaatgctagggagacaaaatcaaatgttaaggggctgggctctcagcacattcttggtttgcattctccagtgggtcagaagcctgacaatccgcctagcctctgctttgagcgtcaggggacccagttctattcctgcatccttagccatcatctacacactttttatcttttcttttaaatttttaaaaattgtgaaatctatatacatataagccatatgttcaacttaaagaatagtaaacaactgtgtccctaggatccaagttaagaaatagatcagagtcagtttcttagaagcttctatatgtgcttctccccagtcatgtgctctcctgtctctacctgagggaaattacagatttcatgcttttctttatagttttcctttacacacatacccttaagcctctaagtactatatggttcggttttgcaaagcccagaagcctattttaatgctgtatataagaatatgctagccgggtatggtgactcatacctgtaatcccagcactttcagaggctgtggcaggagggttgctgaagcctaggaattcaagaccagcctgggcaatatagggagaccccttcactacaaaataaaaaattaaaaaaaaaaaaaaagggcggcc

SEQ ID NO: 46 - DNA, 790 bp, Homo sapiens
  misc_feature (37)..(37): n equals a,t,g, or c
  misc_feature (55)..(55): n equals a,t,g, or c
  misc_feature (76)..(76): n equals a,t,g, or c
  misc_feature (112)..(112): n equals a,t,g, or c
  misc_feature (120)..(120): n equals a,t,g, or c
  misc_feature (137)..(137): n equals a,t,g, or c
tcaactgggtgaaaaggaaaacccacccttggcgccnaatacgcaaaccgccttntccccggcgcgttggccgatncattaatgcagctggcacgacagttttcccgactgnaaagcggncagtgagcgcaacgcanttaaatgtgagttagctcactcattagcaccccaggctttacactttatgcttccggctcgtatgttgtgtggaattgtgagcggataacaatttcacacaggaaacagctatgaccatgattacgccaagctctaatacgactcactatagggaaagctggtacgcctgcaggtaccggtccggaattcccgggtcgacccacgcgtccggttgaatgcactgagtcccttggtgtagtagcaataaggaaaaatgaaattactttcctgtgcacacagtccagcctaattggtatgtgatgttgcacttagcagccatgtggtgggcatgtgtgactactctggttttcactttagtttctaaactttttatccctctcaagtccagcatggatggggaaatgtctctggatccccacagctgtgtacttgtttgcatttgtttccctttgagatttgtgtttgtgtcctgctttgagctgtaccttgtccagtccattgtgaaattatcccagcagctgtaatgtacagttccttctgaagcaagcaacatcagcagcagcagcagcagcagcacaattctgtgttttataaagacaacagtggcttctawwaaaaaaaaaaaaaaaaaaaaaaaaaaaaaaaaaaaaaa

SEQ ID NO: 47 - DNA, 1343 bp, Homo sapiens
ggcacgaggtcaaggcaaaaatgggtcaggtttggagagttcccccactccttttgagtgttcaggttttccttaccatggctcatgctttccatcaagcaccagagttgcagtggcttggcctctggttctgggtgaggttatttgcaggtggagacggggggctgcacctgaacatttctagtgtcaccctccctctccttcatgggaaacagctctccagggaagtaccttcctgccaggggaagccaaggctgggccggccgccctacaaggagccacaggattgcagccatgggtgccacctttcatggaaggggagatttatgggctttcctggaacccccaggctgtcctggccaagaggaaagaggtggttacttcaggagtttgaccttagttagataactaaaagaatacatttcccctcccttttctttatttcctcaataaaaatgtacaaagtatcacccttctccatgccccaatctgtgttaaagtcacaatctatgggtgtagttctgggattctgtcaaattctccttcctgctctccaaaatggacaattgtcgtagggaccacatgcccccagaatacaatggcctctgtgttctactggggtcaagcctgctagaactcagcattcatgacaggggctaagtgtgcatgaagtgacactgactacagctagaaagccaggcgcacaaatgccccttccccccagggccgctctttccagcgcagtcatccagaaaggcccacgtgcagagcccctgtgtctcagatgctgcttcagttgcccgtcctgtcctcagaggccactgtgctggccctctatcatttgacctgactttagaacctgacctcaaggatatggcagcgctagcctttagctcccacagcacggatgggggtgatgccagttagaagtgggtagtgaacgtttgctgagctgttcactgtttctctcttctctttggaagcacctctccgagccatgtgagccccctgatgccaccgagcaggggcagcttcatgaccgatgtctggctgaggctgtggcggacactctcggggttgtctgcaggagagcaagccaggaggacatgggcctggacgacacggcctcgcagcaaagtgtgtcagacgagcagtgacgggcgtgcggccgggcggggaggctggctcccccacacctcccacctgcattgctctccctcgtgctccccaaatcaccacaaccaaccaataccgcaatccatgagggactcctcctgtggaaaaggagagctgttccagaacacagaactgatctcaggtttttgaaaaaaaaaaaaaaaaaa

SEQ ID NO: 48 - DNA, 712 bp, Homo sapiens
  misc_feature (20)..(20): n equals a,t,g, or c
  misc_feature (44)..(44): n equals a,t,g, or c
  misc_feature (56)..(56): n equals a,t,g, or c
  misc_feature (128)..(128): n equals a,t,g, or c
  misc_feature (625)..(625): n equals a,t,g, or c
  misc_feature (692)..(692): n equals a,t,g, or c
  misc_feature (699)..(699): n equals a,t,g, or c
tgttgtttggaattgtggancggattaacaatttcaccacgggnaaccggctttgncccatggattccgccaaggcccgaatttaccccttcactaaaggggaaccaaaagctggagctccaccgcgntggcggccgctctagaactagtggatcccccgggctgcaggattcggcacgaggtttcctgtcagtgctattgagattttattttattaatgtctgcacttagttttacttcctactttctacttttattgagagttaaacctgttgaagtctcaggttcaattcctcaccctgagcaacctaatgttttatgtcttgttcttcctacatttggttattgaaactgaagttttaggttaccagatttgatagaagcacataagactacttactgctttagtctcaattattaattgagaaattatcaattaacaataaggatttctcttatttttccccaagataagttatatatttaaagtgtgttttatagtagaaaggttttagaatatttgggttgctacattaattgaaatggcagctgaagatgtgatttccagccagggatttattaaaaaaaaaaaaaaaaaactcgagggggggccgtacccaatcgncctatagtgagtcgtatacaatcacgggcgtcgttacacgtcggactggaaacctgcgtaccactancgctgcncacaccccttcgc

SEQ ID NO: 49 - DNA, 679 bp, Homo sapiens
ggcacgagtttttatcttagacttgatacatttgcatattactatggaagttattcaccttgtccctgtttttctttaagatattttaaaatcatagttatactacagtccttttttaaatgtatcctgatacattgtaaaatattttaatttcattgtggaaaataatgttggataaggagatatttttcactgttaacttttagcccatgcattttcataatttatttttttcacttgctgctttatatgacatatgtgacatttgattatttaacacttgatgtgatctgcataaacccaagttgcacaaccctcctgctgaagataaaattgaggttaaagataaagatttattttcatatttgtacagtgatcggcttcagtgatggtttttgtgggcatttattgtgtgtgtgtaagaaatttcatatgtatatattaagtaggcctctgagtattgaataattgttttatgattttgatttatatggtttacattttcattgtgtgggccatatttcgtttatactgtttatttctcttcaaaccttaataattataccataaagtgtaatttttatagcaatgcaaatgtctaaggaactacaaatattttctacgttgtaaattcaataaagcttgcttcctttggcaaaaaaaaaaaaaaaaaaaaaaa

SEQ ID NO: 50 - DNA, 627 bp, Homo sapiens
ggcacgaggaattttctttgaagtattttaaaagtaagcgctttactgtgtgagccctggctcttggccagtcctatgaatgggccttagatgatgcccctgaaattgcatgcaaaatgtctttatttgctcaaatgtgtattttttgtgggggtggggggaatgaccttttatcagattctcacagggttcaagatccaaaaaagtttagatctagtgggttaggtgtggatttctctgaaataggccagggaaaaggctgtgacctctccttgggtctgctgcagcgttctagccttggctaggtgaggggaactgttgggccgatgctgtgtggctggagcagaacccacagtgctgtccatagaggagaacaagcaacgaagatcatggctaaagatcttagagatccttaaaatgccgattcctaatctcttgctgaaaactactgacttttagatattttcccgcttgccactctgtaatccagaatattaggaacaagttcttaaactcgagtttacttttcactggtgtttgcatgtgtgggggacaaaagtttatgttcttgtggcaggaaactgtgggatctgcagcatggaggagtttaaaaaaaaaaaaaaaaaa

SEQ ID NO: 51 - DNA, 875 bp, Homo sapiens
  misc_feature (66)..(66): n equals a,t,g, or c
  misc_feature (872)..(872): n equals a,t,g, or c
ggcacagcgcgaggctgggtcccggcccaggagaaggaagtcgctgaaggcagtggccatgctggncgtggaaatgggaggcggttgcagrgggtctatggggcccggtcctggatactcggcaggaagccgtgtctgcagaggctcctccctgcctcaggtggccccgttcaaccccagccgtgcccatctcctgccaccgcctgtcggtgggggtttaaattcggtgtggctttctggggtgcagctcagcacccccccttatgcagactgggagggggtcgggcagtcccctcagccacgaggaccctggatgggttctagttcacttgggaccgtggggcctggctgcgtactgagtgggtgccccacagtcaaggccaacgggggctccccctgctctgagatgttgggagaaaggcggcttctggaaccttccgtgggacccgtaagtggctgtccagaaaggcgggagggtgggcacggggcacggggggcagctggggtcgtcgttaagggtcacgcatccgtacagttgaatttcctttctcttatcatgttttacccaccttgtcccttttttccccaattgtgcttttgcatttttttccttggcaaatgtaaactcagcctttcattcatgacgtgtgaaatttcagtttctctggagtttgtcagacggcgtgggaaccacgcctgaaactcaggtaataggaggaaaaaaaaaaaacttaaaaaaatttttaaaaaacataaaactactctctacctctgctggsccagcctgtctcgccctggccgcggcagggtggcctgtaacaatttcagttttcgcagaacattcaggtattaaaaggaaaaaaaaaaaaaanggg

SEQ ID NO: 52 - DNA, 320 bp, Homo sapiens
agggcgcacggccaattgatgggcatgatccttgtgctggcgagcttcctggcgcacccggtcgaggcgctcgcgcaagctgtcgcgctgggccagcagcaactcgcgctgctcggtgtscarrgccatgctgtcgagggcttcctgcaattgcagrcgtgcttcgccgrcttgttcgtgttcgarggcgcgttgctcgcccatctcggccacttcttcgtcgagccgggtgcggcgcagggtcagttgctcgaccttggccttgytcgccgagagctgggctttcaattcgccctgctggcgcgcttcgtcctgcaaca

SEQ ID NO: 53 - DNA, 710 bp, Homo sapiens
ggcacgagctgggcctccaggttcttcacctgtcacatgatcattttacatattgtggtctgtttatttaccatcagcatcatagaagagcaaaaagaagaaatactgtgctccactaaaagccaggctgagaaaacagttactcacattgagcagtgagtgaccactaggtgggcatttgttcatagctgcatggagaacaagtgcccatatacatctttctgctgatgcagcctctaaattttgaatgcatcagttttttaaactgcattgagcaatattccgtgggtgtgatccataatagcgtaactatttacgcctgtgacagagaggaaaactgtatggatatcagatatctttaagagctttttaatctttaatcaagttagtacttcttaaggatgattaaggccaggcagtggctcacacctgtaatcccagcattttgggaggccaagatgggtggatcccttaaggtcaagagttcaaggccatcctggccaacatggtgaaaccccatctctactaaaaatacaaaaattagctggggtgtggtggcaggcgcctgtaaccccagctactcaagaggctgagacaagagaatcgcttgaagccaggagttggagattgcagtgagccaagatcatgccacttcactccagcctggacagcagagtgggacttcttcttaaaaaaaaaaaaaaaaaaaa

SEQ ID NO: 54 - DNA, 1428 bp, Homo sapiens
agcagggtttgagcctcctggagacattgaatttgaggattacactcagccaatgaagcgcactgtgtcagataacagcctttcaaattccagaggagaaggcaaaccagacctcaaatttggtggcaaatccaaaggaaagttatggccgttcatcaaaaaaaataaggtactgatggttggcgtgaaatgagttttctaaggtgtggagattttgacttgatcttttagtcttagaaaaactaagatcctaaacctgtagtttcagaatgcaaaagaagaagctagtgtgctaccttatgttgagacagtatttctttttggtggtggtatctttgccatggccctgtgtcttatttcagatgcattatcctcgtaccgtgactcccacactaacagagtactgacctctccaccgtttcgcctcatgcctttccctccttcctctcctagactgctggttaccttggctgggagagaggatgtagtgggacattcctgtaacactttatccgcacatctactggaaatcgttaccatgttaataacttggttttgaattcatgttaacatgtgtacccatgaacatttttcattttcttttcatagtgcgatacataggtgcatgacagcattaacctggggacgtagaatatgatcaaggcagcattactgctttaactttagaatgacttactatttattaatttaaacagactgctgtttccacaaccttagcattgaaggtctttcattttctcccatcaagctatgttagtttaggtaatgtagaaatatttaccctctggcttaagctggtttagagtaactaactagagctatagtttgcatgggaaagtctgcacgagcttcttgtcagatatttcttgctcttctgtcgcattacttactaaacctcccaactctcatcatattcttcatttaaccacctcctacatgttttcttttggaccatggcctaaaatttaattgtttgtgttttacttgcgttggatttcaaatattatttgatgcttatttttgttttgtgtcttcttgtttctgatttttactctgtcacggctccatctcttacatgtagcttatgtcccttttaacatccccccatcagcctccccctccccctcctgcctctgcctcaccctctgctgttcccaacggcccccagtctcccaagcagcaaaaggaacccctctcccaccgcttcaacgagttcatgacctccaaacccaaaatccactgcttcaggagcctaaagcgtggggtaagttctgctccggaatcctgtctctctggcgtgctttggttgcatgtttggttctgcataactaattttgtttgtgaatgaatccattgtgttttcccataacatataaaaaagttaaaaaaaaaaaaaaaaaactcgag

SEQ ID NO: 55 - DNA, 1691 bp, Homo sapiens
cccacgcgtccgcgcacctccagctcgggccgatgtggaagctttggagagctgaagagggcgcggcggcgctcggcggcgcgctcttcctgctgctcttcgcgctaggggtccgccagctgctgaagcagaggcggccgatgggcttccccccggggccgccggggctgccatttatcggcaacatctattccctggcagcctcatccgagcttccccatgtctacatgagaaagcagagccaggtgtacggagaggtacagccccgacgggccccgggcagggagggccgccaggctggcccgggctggccagggccttcctggttggacttatggccgcccctgggccgactagtcgggacctctccgtgtgccggctgccctttgagggacacccgcttcccgggtctggaagggagaagtcctcgacgccgtgcccccttgcagggggagccccgcccctgccggtgacccactccgggccgaggctccgaggcgatccagtcctgattttcccgctaccgctcgagctcttgctcctgcgcctgcgccgtttggctcgccagccgcgccgccacttcaggtccagggtggacgcatgccctcaggtgcgggcgtcttgcgagtcggcctcgcagctctgtggaagctgcacgcggcttgtcggaaaatcaaggcgttctgagttctagatggttaatagcaggttcttcggtgtctgcagtcgacgaacgactggtgtaggcgtttgctgtgagaatggagaatgcaggggaacgcccctgactgagaagcgggccctgggaaacgattgtgaacgcgtgaatgaattgatgactaaaatccgctgcgggggtcctacagcgcagatggtaatgccgttctgactggctgggaacggcaccttagcagatacttaaaaggcgccttctgtgtgccactgtcactgccaacttggtgactcatttaaaactcataaccagccggtgaggtcggtacttcgctcctcctcattctgcggaggggaaagcagcacggaaatgccctgtgactggcagcggaaaaggcgaccaccgcttgtgtgtgggtgtcccgacgtccggagggggcaggagtttccacgggtcctgggacagagctcacctgttttgttttgaattacacttatttatatgcaactacaggcctgacgctagcggtgaagaaggcagatacagccttttaaggagttggcagatgagtgggagagagaaaactaatctcattatcggccacaggctgtggtcagtgttttgaaggaaaagtacagggatgtttggcaactgtggtatttcaggtttgaccttaaatccttacttaaaccagtttttacaaggattggtctaggtgcccgggcgcggtggctcacgcctataatcccagcactttgggaggccgaggcgggcggatcacgaaatcaggagatcgagaccgtcgtggctaacacggtgaaaccccatctctactaaaagaatacaaaaaattggccgggcgtggtggcgggcacctgtggtcccagctattcgggaggctggggcaggagagtggcgtgaacccgggaggcggagctttcagtgagccgagatcgcgccactgcactccagcctgggcaacagagccagactccgtctcaaaaaaaaaaaaaaaaaa

SEQ ID NO: 56 - DNA, 3447 bp, Homo sapiens
accaattcccttcctgggagttgcggcttccctcgctcggccccactcccgtttaccctttccccagctcccgccttagccaggggcttccccgcctgccgctagggctcgggccgaagcgccgctcagcgccagcctgccgctccccgggctccactttcactttcggtcctgggggaactaagccggaggcagtggtggtggcggcggcgcaagggtgagggcggccccagaaccccaggtaggtagagcaagaagatggtgtttctgcccctcaaatggtcccttgcaaccatgtcatttctactttcctcactgttggctctcttaactgtgtccactccttcatggtgtcagagcactgaagcatctccaaaacgtagtgatgggacaccatttccttggaataaaatacgacttcctgagtacgtcatcccagttcattatgatctcttgatccatgcaaaccttaccacgctgaccttctggggaaccacgaaagtagaaatcacagccagtcagcccaccagcaccatcatcctgcatagtcaccacctgcagatatctagggccaccctcaggaagggagctggagagaggctatcggaagaacccctgcaggtcctggaacacccccctcaggagcaaattgcactgctggctcccgagcccctccttgtcgggctcccgtacacagttgtcattcactatgctggcaatctttcggagactttccacggattttacaaaagcacctacagaaccaaggaaggggaactgaggatactagcatcaacacaatttgaacccactgcagctagaatggcctttccctgctttgatgaacctgccttcaaagcaagtttctcaatcaaaattagaagagagccaaggcacctagccatctccaatatgccattggtgaaatctgtgactgttgctgaaggactcatagaagaccattttgatgtcactgtgaagatgagcacctatctggtggccttcatcatttcagattttgagtctgtcagcaagataaccaagagtggagtcaaggtttctgtttatgctgtgccagacaagatgaatcaagcagattatgcactggatgctgcggtgactcttctagaattttatgaggattatttcagcataccgtatcccctacccaaacaagatcttgctgctattcccgactttcagtctggtgctatggaaaactggggactgacaacatatagagaatctgctctgttgtttgatgcagaaaagtcttctgcatcaagtaagcttggcatcacaatgactgtggcccatgaactggcccaccagtggtttgggaacctggtcactatggaatggtggaatgatctttggctaaatgaaggatttgccaaatttatggagtttgtgtctgtcagtgtgacccatcctgaactgaaagttggagattatttctttggcaaatgttttgacgcaatggaggtagatgctttaaattcctcacaccctgtgtctacacctgtggaaaatcctgctcagatccgggagatgtttgatgatgtttcttatgataagggagcttgtattctgaatatgctaagggagtatcttagcgctgacgcatttaaaagtggtattgtacagtatctccagaagcatagctataaaaatacaaaaaacgaggacctgtgggatagtatggcaagtatttgccctacagatggtgtaaaagggatggatggcttttgctctagaagtcaacattcatcttcatcctcacattggcatcaggaaggggtggatgtgaaaaccatgatgaacacttggacactgcagaggggttttcccctaataaccatcacagtgagggggaggaatgtacacatgaagcaagagcactacatgaagggctctgacggcgccccggacactgggtacctgtggcatgttccattgacattcatcaccagcaaatccgacatggtccatcgatttttgctaaaaacaaaaacagatgtgctcatcctcccagaagaggtggaatggatcaaatttaatgtgggcatgaatggctattacattgtgcattacgaggatgatggatgggactctttgactggccttttaaaaggaacacacacagcagtcagcagtaatgatcgggcaagtctcattaacaatgcatttcagctcgtcagcattgggaagctgtccattgaaaaggccttggatttatccctgtacttgaaacatgaaactgaaattatgcccgtgtttcaaggtttgaatgagctgattcctatgtataagttaatggagaaaagagatatgaatgaagtggaaactcaattcaaggccttcctcatcaggctgctaagggacctcattgataagcagacatggacagacgagggctcagtctcagagcgaatgctgcggagtgaactactactcctcgcctgtgtgcacaactatcagccgtgcgtacagagggcagaaggctatttcagaaagtggaaggaatccaatggaaacttgagcctgcctgtcgacgtgaccttggcagtgtttgctgtgggggcccagagcacagaaggctgggattttctttatagtaaatatcagttttctttgtccagtactgagaaaagccaaattgaatttgccctctgcagaacccaaaataaggaaaagcttcaatggctactagatgaaagctttaagggagataaaataaaaactcaggagtttccacaaattcttacactcattggcaggaacccagtaggatacccactggcctggcaatttctgaggaaaaactggaacaaacttgtacaaaagtttgaacttggctcatcttccatagcccacatggtaatgggtacaacaaatcaattctccacaagaacacggcttgaagaggtaaaaggattcttcagctctttgaaagaaaatggttctcagctccgttgtgtccaacagacaattgaaaccattgaagaaaacatcggttggatggataagaattttgataaaatcagagtgtggctgcaaagtgaaaagcttgaacgtatgtaaaaattcctcccttgccaggttcctgttatctctaatcaccaacattttgttgagtgtattttcaaactagagatggctgttttggctccaactggagatacttttttcccttcaactcattttttgactatccctgtgaaaagaatagctgttagtttttcatgaatgggctatcgctaccatgtgttttgttcatcacaggtgttgccctgcaacgtaaacccaagtgttgggttccctgccacagaagaataaagtaccttattcttctcattttatagtttatgcttaagcacccgtgtccaaaaccctgtaccccatgtttatcattcataaactgtttcatcagtctcaaaaaaaaaa

SEQ ID NO: 57 - DNA, 1513 bp, Homo sapiens
  misc_feature (1463)..(1463): n equals a,t,g, or c
  misc_feature (1490)..(1490): n equals a,t,g, or c
  misc_feature (1503)..(1503): n equals a,t,g, or c
gggcctcagggaccccattccccgagagacggcaccatgacccagggaaagctctccgtggctaacaaggcccctgggaccgaggggcagcagcaggtgcatggcgagaagaaggaggctccagcagtgccctcagccccaccctcctatgaggaagccacctctggggaggggatgaaggcaggggccttccccccagcccccacagcggtgcctctccaccctagctgggcctatgtggaccccagcagcagctccagctatgacaacggtttccccaccggagaccatgagctcttcaccactttcagctgggatgaccagaaagttcgtcgagtctttgtcagaaaggtctacaccatcctgctgattcagctgctggtgaccttggctgtcgtggctctctttactttctgtgaccctgtcaaggactatgtccaggccaacccaggctggtactgggcatcctatgctgtgttctttgcaacctacctgaccctggcttgctgttctggacccaggaggcatttcccctggaacctgattctcctgaccgtctttaccctgtccatggcctacctcactgggatgctgtccagctactacaacaccacctccgtgctgctgtgcctgggcatcacggcccttgtctgcctctcagtcaccgtcttcagcttccagaccaagttcgacttcacctcctgccagggcgtgctcttcgtgcttctcatgactcttttcttcagcggactcatcctggccatcctcctacccttccaatatgtgccctggctccatgcagtttatgcagcactgggagcgggtgtatttacattgttcctggcacttgacacccagttgctgatgggtaaccgacgccactcgctgagccctgaggagtatatttttggagccctcaacatttacctagacatcatctatatcttcaccttcttcctgcagctttttggcactaaccgagaatgaggagccctccctgccccaccgtcctccagagaatgcgcccctcctggttccctgtccctcccctgcgctcctgcgagaccagatataaaactagctgccaacccagcctgtggccaggtcactgtctaccccagcccagcccagccctctgccgcttgtacatacgccatggggaccctgaggaactgaggccacgtcaatccctgtgccgccccattcgcccgttacatcttccaaactgggacggtcaaggctgaaggctcctctgggtttgagggtccaagggacaaggaggagaagcctagcaggatttcagatgcaggagagagacccaggaagcccggcagagccctgagccccactgcaattcctcctagggctgcacaatcatgtggccttagggcacactgtcctgcatccagtctgtgtcctcctgtctttctcatccaggtcaggcattgacatttgtaagaaanggggtaagggacacagctgggcaagtngattggttggcangattgctgtc

SEQ ID NO: 58 - DNA, 6107 bp, Homo sapiens
  misc_feature (5749)..(5749): n equals a,t,g, or c
  misc_feature (5892)..(5892): n equals a,t,g, or c
  misc_feature (5896)..(5896): n equals a,t,g, or c
  misc_feature (5906)..(5906): n equals a,t,g, or c
  misc_feature (5957)..(5957): n equals a,t,g, or c
  misc_feature (5966)..(5966): n equals a,t,g, or c
gcagttagttccttgatgtcagtagtgggctaaaggcagcttactgtgtgtttgctggagctttcactcagccaagtgttagagtcaggaaacccattgaggcaatggcgtcaaatggtgtttcacaagaatgagccattcagtctttgctcactatatatttaatattttattattgttgttattgttattattaattggctttctgtattctatgccttttatttataaagacactaagaaaacccatgtttgtaattttaataacatttttcccatcttgtaatatccagagctactttataaattctctgaaccaaaagtattttcctcagtgtatctcttctcccccagcccctattgggaaaaattacccagtatagttcaggttatgaggaggatcagccacacaatccagtgcttcagtttgaaaatgtaaaattctaaccctaaagtagggttggttgaaatttcagacaaagcaaacccagcaggtataaaaagtagtataaatacaaatctgtaagttatttttgaattttctgaacttttttctaagagattacataggagactaaagaaatctatctgttcaagttctaattaggatgattgttaatactgcactgtggatgaagtggcgactggcttgtgtgctgacttctgtggtttagcaagaggtttattgttatcaaatgctaattggcaatgccaagtcactgggaccaattttctgttttataatatctaagtttagaacagaatatatacctgaactgtagtggtttgatcggatggagacagaaaacccgatttttattctcataaattttgtggttatttatacaagggctgtgctatgctaccatattcttgttcaataataataggtttgttgttttttttacattgttaaatgttccttacccctaaaggtcaatgttaagtacaacattctgaaaatacaatttggctacgaagagtattcatcttctttgaagctcagtggttgatatttgtgctaataatgcaatttcctgattcctgttacaagttatagctacatatgggagagactcagtgagccagcaaaggccatagaaacaacaatttattaaatgtatttatggcagaaggacctaaataaactgtgagccaccttttcttctttatattgttacatttaagtgttcttgctttcagcaactcacattaatgcttggagcttatctctttctctctctctctctctctctctctctgtgtgtgtgtgtgtatgtgtgtgtgtgtgtgtgtgtgtttccttattgtcattccattatatatccacaccaacatgggtgacgataattcaaagtcatattttgcctctaagcttgatcatgttacctttatgattaaagtatcatgttatttagccaatgcaaatctgttttaaaacaaatagtttaaaaaaagaacaagtttttaagggctttattatagaagaagtattaatgaaggactttccttcctccctccctttcctcccctccctgcctcccttcttcccttccatctccccctcctccctgccttctttgtttctccttcccttattcctccctccctcctttctcccttccttcctttcttccattcatccttccttgccttttatttttattttttgtaatatcacatgtgctgtagtttggaattttattctagtgcatttcttgctcatcagaacctcagctaatctacctaggaaaaatagtatcaaaggaaatgagaaagttgtatctgagtccctccagaactaagataattctttttgaccatttaagcctttataaatgcgttttgaccatttaagcctttataaatgcttgttttaggaaagtgaatctgttagatgcatcaacaaataatgaccaggacaaaacgatttaataattaaagtctcaaatcaccatggttatacattttcaccagaaatagtaatcttacaatttttcatttttctgatgaagatttctgttccaatatctgtttcctaatagattttttaaattaattagctttcctctgctttatgaccacaggttttatccctaaccgagacagctgtcttatatctgcatgccttagactgtgtggagggactccatgaagaaagaccataggttagaaaaataactcatagtatataccctagtaagtgggttagtagaatctcataacatgtattaaaaagaggttttcttctctgcttgtttgtgtcactagagcaaaattgtagagataatgctcataatgcagtaaatatcagaataatctacaatatcatttgtggatggtcccaggtcccagtgctctagttactttacttctttttttttttttgagatggagtcttgctctgtctctcaggctagagcagtgtgcgatctcagctcactgcagcctccacctcccaggttcaagcgattctcctgcctcagcctcccaagtagccaggattacaggcaccctccactaggcccggctaattttttttgtatttttttagtagagatggggttttgccatgttggccaggctggtttcgaactcctaacctccagtgatccacctgcctcggcgtcccaaagtgctaggattacaggcatgagccaccacatccggcctaattacttctttaatccccatttatttttatgccattctagcctcatttattaataaaattatgtttttactttctctttcaggaaattttttaaattaatattttatatctagatctaatgctatggaaaagtgcctttttatcatttataatttcatttttcactatttccaaaaacacataaacaaatagtttcagtaggtcccagcttttactttttccatttaaaccttcttttctccatttcttccctttggcttaagaataaaagaaaaggtacattgctagaattgtttctttgggagagggtaaaagattacagaattagactgttcagcctttatataaactaaatttgtcttcatctcaaccagctaatggtaggtcttatctgaatactcatgagaattttagcatctgtgaaactccatgcaccagatgtgtgtaaatttcaggaagaaagtgttgaaagcattttctctgatgttaattagatggaaataaatcactaaaacatagtttaggtaaagcctgattatgccacttttttttaactagacagggcaaagttgtttatgttagtgtacttcttgtctatcctcagttaatttacctagacaaaaagtgtcaaaggaaatgagaaaaaggttatatctgactccctccagacctaagataattccttttgatcagatacagtcagatggagtgccttggtttttgttaattttgcctctattccagctccttaccacagcggtggtgcttaaagaaaggatcatcagcaacaggtcaggatagttctacctttgggatagggctgctttccccgtgctagtatttctgtgactgttagtggcactgaggactgcaaacttttatgcaatattcttaataccctattgatattatgcactttaatcattccaaagaagccaagaatgctgtatagtgatgattccttcctaatgaattcatcttaactatttagaatgttatgtcccttttcttttggatagccaacttggtataaatgttatatggatttttctaaaatgactatataggacttaagactttgaaatgtaatttacttataaggggaaataattatgctttagcacatcattttagaaacgtcacattttagaaacattcagcttgctaacctacatgtttgggaattcattaaaaccagttgtctatatattttgtgccatgtatataagaacattacaatatatctttttctacatatgtagtatgtgcaaccagtggttctcagagtatggttctcagcccaccagctagtatcagtatcacctgggaactagttagaaatgtaaattctttggccccatcccagacatactgagtcagaaattctggaatagggcccccgcaatctgttttcacaagccctccaggtgattctgatgcacactttaaagtttaggaaccactgggctaagactctgttgagatatagagtttttcttccactcagactgatatagttatacattgttcttcatgtaaattcagcttaacctggttatctataatcttttattggcaaaagttaattctcagtactgcctatagagatacagtgtattttatgtacatacacaattagtctaattcttgataattcagttaatttagtttggcattttcctaccacttactaaaaggtttacattaaatgactgatttaaatatataggtgcaatgttctatgtttattttaattgttatgacatttaagtagctaatataattgaccggtgctaaagtctcctgtttatccataaaatgggtacattatgggcagtgtaatacaagctttcttttcattgcctagtactttaccagcagaccacagttttgccctggctagaccaaccctcagaacaaaatcatcattccttgtatttatatttgtatctgagatagtaaacaagatggctggccaggtcaacatggcaccttaacttatttttttaataggtaaaacttcttcaaaagtagcttgctttgtataagaactaagctatcagtatagatatagctatccttggagcttatgtttcagacaagaattatttactaaaataaataataaacaagataatgcattatacaatttgggcatttctcgtttctcaagtgtatgcatcatggtaaatataaactaaccacaagataggtagattgattcatttcattttaatctccttgtgtaattcagtacctccataattgttctaatcttcttcccactgtttacaaattaccagttaattaactcgtgaaagaaaaattcacatatcagaataaaaataaatgtatactcactttataaaaatcaccactgctgtctttccttaatactagcagtggaaatgtaagtggcttactctacaaattttggtgctggcaaatacataggcaaactgttgggagctgctctagttacattcctcccttcttattccctttttctcttcctcactttattgcataacatattcctgtacccaaagcattctaccacagttctatttgactcccacttgtaataactcctttaaaaaattccatgtttaaccatatgaccctgcttgcttactcatattctccctccctctccccttcctttctctctcttccagaagtcatttgcctggtttgaaatattttgtagggattgcttattatattattttagctgatgaacctcaggacaacgtctacacacacacacatacatacacgcacacaaaatctcagctgttgaagagtgggcttggaatcagacttctgtgtccagtaaaaaactcctgcactgaagtcattgtgacttgagtagttacagactgattccagtgaacttgatctaatttcttttgatctaatgaatgtgtctgcttaccttgtttccttttaattgataagctccaagtagttgctaattttttgacaactttaaatgagtttcattcacttcttttacttaatgttttaagtatagtaccaataatttcattaacctgttctcaagtggtttanctaccattctgccatttttaatttttatttaattttatttgcttgagcacactgatcaaccactgaactgccttcttccattgtcctgcaatgatataagggttacatttttgtgtatatggctttcatagttgggatttcanagcnctgataccanatattttcagtttgttctctgggggaatttcatttgcatctatgtttttanctatctgtnataacttgttaaatattaaaaagatattttgcttctattggaacatttgtatactcgcaactatatttctgtaaacagctgcagtcaaaaataaaacactgaaagttttcaaaaaaaaaaaaaaaaaaaaaaaaaaaaaaa

SEQ ID NO: 59 - DNA, 3037 bp, Homo sapiens
aattcggcagagcctaggaggagaaagttccatcatgtcggagatcagaggaaaacccattgagtccagctgtatgtatggcacctgctgcctctggggaaagacttattccatcggatttctgaggttctgcaaacaggccaccctgcagttctgtgtggtgaagccactcatggcggtcagcactgtggtcctccaggccttcggcaagtaccgggatggggactttgacgtcaccagtggctacctctacgtgaccatcatctacaacatctccgtcagcctggccctctacgccctcttcctcttctacttcgccacccgggagctgctcagcccctacagccccgtcctcaagttcttcatggtcaagtccgtcatctttctttccttctggcaaggcatgctcctggccatcctggagaagtgtggggccatccccaaaatccactcggcccgcgtgtcggtgggcgagggcaccgtggctgccggctaccaggacttcatcatctgtgtggagatgttctttgcagccctggccctgcggcamgccttcamctacaaggtctatgctgacaagaggctggacgcacaaggccgctgtgcccccatgaagagcatctccagcagcctcaaggagaccatgaacccgcacgacatcgtgcaggacgccatccacaacttctcacctgcctaccagcagtacacgcagcagtccaccctggagcctgggcccacctggcgtggtggcgcccacggcctctcccgctcccacagcctcagtggcgcccgcgacaacgagaagactctcctgctcagctctgatgatgaattctaggtgcgggctgcagtggcggaagtgctggcgccatagccacggtcaggctgtgccccacctccagcctcaccaccaggccaggaggcagctggcacagtgctcacgccgcctttatttattggaccagaaacactcacatgtcgcttccagaggaacgggggacagccaggctcgcccatgggccttcaggaatatttatacatggcccagcctgcactgcccgggcgagggcagaggacactgggagcaaggcttatgcccctgctgcccgtcctgtgctgggggcatgctgggaccagccgcacccaggccccaatgcttgtgtgtggaccagcggctgcagccttctagcccctcctccccgcgagactctcaggctgaggtcggcaagccgtggctcccccacacaccgtgcaataccctgtctgacctgggctcttcccgcctgcatccctyccctgtccacctttgtccagtgctagattcacctcaccccgggcaggagtggggatgtgggcgctctgtggtcctcccctcctgacccaggcctctgtggcatgctgcaaggatcagagccagacaccaggagtcacaggccccacccaggaagggcattcagggcccctgggcaccgcttctgttgaagcaggggcttctgggcccctgggtatccccacctgtcgtggccacacctctgcctgcctcatgccccttccccctggcctaccaaggacagcccacagcccgcactgccggctcacttgggtccttcctcgatagctttgggcagagcccttgcttcctggctgcttcagggctcaggggctcccagccctccttcccaggctgatgctgggtcctctctctctttggggcttctccctcccgtttcaggggaaaggtctgagtctccacgtttcagaccagcttctgggggaaggcagtccggcagggagaccgggaggggtggccacacagtggggagctgggaggtggggggaatggtcccagactcctctcggggcccctatccacacagggcctggtgttctaccccatctggcccctggcccatctcttctgtgccttagtcacatatgaaagcgcccctccctggctccccatctgtcccacacgctccctggggctcttagttcagctgctggcactcgcaggatcctgcagtgctgggcccagagcccttggacaggcctcaggagtggtcaggaccaccaagcccctcctctccccctccacacctctagacctggggcctccggaacccccagcaggctgggcttatactagctcctgacttaggaagagcctcgtgtcacaacacgtgtccctacaggcaaagtgtcctggcatttaaaacccagattatccctgggtttgggctgcagtcacctggagaagctggtagggtaagggagagggaccctgccggtgttcactggggattctttcttttggtccttcctggaatgaacaggttccctccctgccacctgtgaggagagttggggcccagccgtcttcctggcctccttcctttcctcgtggcagaggcctgcatgtgggtgccagaggccagctctccccctccatcttgggggggcggagcagttgggcccaagctgcccgggagggtgggtgcagacacaggctgaggaccagccctggccctgccccgccatctgctttcaccaagctgtctctccaccgtggcttcccttctccctccaggccaaagtgctgctgattcccactcccttggttttcgcctgcccagcgttgctgtttgcgtggagggtggggggagctcagtggcagggaatcagcggtccgtggggtcgtggggacgggaacatgtgcccgaccgctccatcccctcctcctccttaggatgcataacctaccttgtctttttttttttaaattttctttccaggtagagtagctctttgtacataaagaatacttgaaaaattaattgtatgatgtatgagaagacagagtctcctagttttgtatcttgttgtatgactgccatgagttccaccagaaagccactctattttggtctctgtgacattttaaatgcgtgacagaagtgagcaaataaagtgaggaagaaatctaaaaaaaaaaaaaaaaaaaaaaaaaaaaaaaaaaaaaaaaaaaaagggcggccgc

SEQ ID NO: 60 - DNA, 767 bp, Homo sapiens
catgaaaacacattctcttatagtttttaaattcatcatccaagagttcctgctctttgatgatgagacatacctggtagactccaaaacagagagcagacgcctagtatctttgttctggggtgtgcattaagagtacattgacctgtctgtctccagtcttgactcttttggaagagagatgctagtactgatgacaacctgcattctggctgcggtgtgygtccacactgcacagtgtgcaccagactctcgtatggacaatgactgtccctcacatcaggcgcagatccattttagagcctcagaagtcaggagagggtggactttcaaccacgactgaaaacactgtctttcttaggacatgctgtgtgtatgacacacttacagatgtctgtgctcactgatgcttgttgatgtgtcatcgcacatcagtgacaaacatttgtcatgtttttgcctttggtggaacttctttattatactcactttcctcccaaaccatttttctcaacttcatcatgaagcaaatgtcatgtggtcattctgtgatggggctcagggctaggttaggtgatgatttctgaaagctcagagacgtgaaggaaaaaggacatcagtgcttggatcttagctcttataagcctcacgtgcaacaataaacccgagttcaagaatcagattcttagatagattggtttggtagcaaatgacaaaaaaccaacgtaaatatgcttcggcaaaaaaaaaaaaaaaaaagggcggcc

SEQ ID NO: 61 - DNA, 2687 bp, Homo sapiens
  misc_feature (1614)..(1614): n equals a,t,g, or c
gtacaccatgggcctccacctccgcccctaccgtgtggggctgctcccggatggcctcctgttcctcttgctgctgctaatgctgctcgcggacccagcgctcccggccggacgtcaccccccagtggtgctggtccctggtgatttgggtaaccaactggaagccaagctggacaagccgacagtggtgcactacctctgctccaagaagaccgaaagctacttcacaatctggctgaacctggaactgctgctgcctgtgcatcattgactgctggattgacaatatcaggctggtttacaacaaaacatccagggccacccagtttcctgatggtgtggatgtacgtgtccctggctttgggaagaccttctcactggagttcctggaccccagcaaaagcagcgtgggttcctatttccacaccatggtggagagccttgtgggctggggctacacacggggtgaggatgtccgaggggctccctatgactggcgccgagccccaaatgaaaacgggccctacttcctggccctccgcgagatgatcgaggagatgtaccagctgtatgggggccccgtggtgctggttgcccacagtatgggcaacatgtacacgctctactttctgcagcggcagccgcaggcctggaargacaagtatatccgggccttcgtgtcactgggtgcgccctgggggggcgtggccaagaccctgcgcgtcctggcttcaggagacaacaaccggatcccagtcatcgggcccctgaagatccgggagcagcagcggtcagctgtctccaccagctggctgctgccctacaactacacatggtcacctgagaaggtgttcgtgcagacacccacaatcaactacacactgcgggactaccgcaagttcttccaggacatcggctttgaagatggctggctcatgcggcaggacacagaagggctggtggaagccacgatgccacctggcgtgcagctgcactgcctctatggtactggcgtccccacaccagactccttctactatgagagcttccctgaccgtgaccctaaaatctgctttggtgacggcgatggtactgtgaacttgaagagtgccctgcagtgccaggcctggcagagccgccaggagcaccaagtgttgctgcaggagctgccaggcagcgagcacatcgagatgctggccaacgccaccaccctggcctatctgaaacgtgtgctccttgggccctgactcctgtgccacaggactcctgtggctcggccgtggacctgctgttggcctctggggctgtcatggcccacgcgttttgcaaagtttgtgactcaccattcaaggccccgagtcttggactgtgaagcatctgccatggggaagtgctgtttgttatcctttctctgtggcagtgaagaaggaagaaatgagagtctagactcaagggacactggatggcaagaatgctgctgatggtggaactgctgtraccttaggactggctccacagggtggactggctgggccctggtcccagtccctgcctggggccatgtgtcccccctattcctgtgggcttttcatacttgcctactgggccctggcncsgcagccttcctatgagggatgttactgggctgtggtcctgtacccagaggtcccagggatcggctcctggcccctcgggtgacccttcccacacaccagccacagataggcctgccactggtcatgggtagctagagctgctggcttccctgtggcttagctggtggccagcctgactggcttcctgggcgagcctagtagctcctgcaggcaggggcagtttgttgcgttcttcgtggttcccaggccctgggacatctcactccactcctacctcccttaccaccaggagcattcaagctctggattgggcagcagatgtgcccccagtcccgcagctgtgttccaggggccctgatttcctcggatgtgctattggccccaggactgaagctgcctcccttcaccctgggactgtggttccaaggatgagagcaggggttggagccatggccttctgggaacctatggagaaagggaatccaaggaagcagccaaggctgctcgcagcttccctgagctgcacctcttgctaaccccaccatcacactgccaccctgccctagggtctcactagtaccaagtgggtcagcacagggctgaggatggggctcctatccaccctggccagcacccagcttagtgctgggactagcccagaaacttgaatgggaccctgagagagccaggggtcccctgaggcccccctaggggctttctgtctgccccagggtgctccatggatctccctgtggcagcaggcatggagagtcagggctgccttcatggcagtaggctctaagtgggtgactggccacaggccgagaaaagggtacagcctctaggtggggttcccaaagacgccttcasgctggactgagctgctctcccacagggtttctgtgcagctggattttctctgttgcatacatgcctggcatctgtctccccttgttcctgagtggccccacatggggctctgagcaggctgtatctggattctggcaataaaagtactctggatgctgtaaaaaaaaaaaaaaaaaaaaaaaaaaaaaaaaaagggcggcc

SEQ ID NO: 62 - DNA, 728 bp, Homo sapiens
aaatgatttagtgacctatacaagtagcctgcagtaccggatccgaattcccggtcgacccacgcgtccggtgaaaacagcagagtgctactccataccactgggatcttgtccagtaaacatccagagagtgaggttaggaaataaaaagtatataaatattagatgcctagaaatgcaagtcactttaaagattttatgtgaaatagaaaaaaaagagaggagagggactcattgtcttgtaatgggtccttcccagagagaggtgactgtccagtggcaccgggcccttttcctccttccccttttactcttatcaactaggacagaaactaagaattttggcttcaagtggctaaaagactgatgggggaaaaaagaaaatagaaaaaaataacagagagactgacgctctaggcagttacaagtccaagaaaaaagacagaaacttttaagtattgagccaaaaccaggtctagcaamcataatgctggccctagattatttattaatttatgaagaaacttctagatatgggggtgacaaaaggaaattaaatccattatatatgcatatattttaatgtaaatatataatagataaattatgtatacataatatataaccaaattgaaacagttttacaatttggtttgactggaaattcaaaatccatatattaatttttgtagtaaaagtttatgtaaaaaaaaaaaaaaagggcggcc

SEQ ID NO: 63 - DNA, 1635 bp, Homo sapiens
  misc_feature (85)..(85): n equals a,t,g, or c
tcgacccacgcgtccgcagctctccgtggacaatgggctgtggcgtgtgaccctgtgcatgctggccttcccgctgctcctcacnggcctcatctccttcagggagaagaggctgcaggatgtgggcacccccgcggcccgcgcccgtgccttcttcaccgcacccgtggtggtcttccacctgaacatcctctcctacttcgccttcctctgcctgttcgcctacgtgctcatggtggacttccagcctgtgccctcctggtgcgagtgtgccatctacctctggctcttctccttggtgtgcgaggagatgcggcagctcttctatgaccctgacgagtgcgggctgatgaagaaggcagccttgtacttcagtgacttctggaataagctggacgtcggcgcaatcttgctcttcgtggcagggctgacctgcaggctcatcccggcgacgctgtaccccgggcgcgtcatcctctctctggacttcatcctgttctgcctccggctcatgcacatttttaccatcagtaagacgctggggcccaagatcatcattgtgaagcggatgatgaaggacgtcttcttcttcctcttcctgctggctgtgtgggtggtgtccttcggggtggccaagcaggccatcctcatccacaacgagcgccgggtggactggctgttccgargggccgtctaccactcctacctcaccatcttcgggcagatcccgggctacatcgacggtgtgaacttcaacccggagcactgcagccccaatggcaccgacccctacaagcctaagtgccccgagagcgacgcgacgcagcagaggccggccttccctgagtggctgacggtcctcctactctgcctctacctgctcttcaccaacatcctgctgctcaacctcctcatcgccatgttcaactacaccttccagcaggtgcaggagcacacggaccagatttggaagttccagcgccatgacctgatcgaggartaccacggccgccccgccgcgccgccccccttcatcctcctcagccacctgcagctcttcatcaagagggtggtcctgaagactccggccaagaggcacaagcagctcaagaacaagctggagaagaacgaggaggcggccctgctatcctgggagatctacctgaaggagaactacctccagaaccgacagttccagcaaaagcagcggcccgagcagaagatcgaggacatcagcaataaggttgacgccatggtggacctgctggacctggacccactgaagaggtcgggctccatggagcagaggttggcctccctggaggagcaggtggcccagacagcccgagccctgcactggatcgtgaggacgctgcgggccagcggcttcagctcggaggcggacgtccccactctggcctcccagaaggccgcggaggagccggatgctgagccgggaggcaggaagaagacggaggagccgggcgacagctaccacgtgaatgcccggcacctcctctaccccaactgccctgtcacgcgcttccccgtgcccaacgagaaggtgccctgggagacggagttcctgatctatgacccacccttttacacggcagagaggaaggacgcggccgc

SEQ ID NO: 64 - DNA, 1727 bp, Homo sapiens
  misc_feature (979)..(979): n equals a,t,g, or c
  misc_feature (1047)..(1047): n equals a,t,g, or c
  misc_feature (1135)..(1135): n equals a,t,g, or c
ccacgcgtccggccatggttgccactgtctgtggcctcctggtcttcctgagcctgggcctggtacccccagtccgctgcctgtttgcactcagcgtgcccaccctgggtatggagcagggccgccggctgctcctgtcctacagcactgccaccctggccattgctgtggtgcccaacgtcctggccaacgtgggtgcggccgggcaggtgctgaggtgtgtcaccgagggctccctggagagtctcctcaataccactcaccagctgcatgcagcatccagggctctgggccccacaggccaggcaggcagccggggcctgacatttgaggcccaggacaatggctctgccttctaccttcacatgctcacggtcactcagcaggtcctggaggatttctctggcctggagtccctggcccgggcagcagcgctagggacccagcgagtggtcacagggctgtttatgttgggcctcctggtggagtcggcatggtacctccattgctacctgacagacctgcggtttgacaatatctacgccactcaacagctgacccagcggttggcacaggcccaggctacacacctcctggcccctccacccacctggctgctccaggcggctcagctgaggctgtcacaggaggagctgttgagttgtcttctaaggctggggctgcttgccctgctcctcgtggccacggctgtggcggtggccacagaccatgtagccttcctcctggcacaggctactgtggactgggctcagaagttgccaactgtgcccatcacgctcacggtcaagtatgatgtggcatacactgtcctgggcttcatccctttcctcttcaaccagctggctccggagagccccttcctctccgtccacagctcctaccaatgggagctccgcctcacctccgcccgctgcccactgctacccgcccggcgtccccgcgcagctgccccgctggncgcggggggcctgcagctcctggcgggctccacggtgctcctggagggctacgcccgccgcctgcggnatgccatcgccgcttccttcttcacagcccaggaggcgaggaggatccgccacctacacgcccggctccagcgaagacacgacaggcnccaaggccagcagctgcccctaggggatccttcttgcgtccccacacccagacctgcctgcaagcctccggcatggatagcctacaggctggatgccttaagaaccgagagcagtgagggagaagggaaagagctttggagttgcagagacctgagttgtcaccttggtcctgtgccgcctccctgtgtgaccttgggtaagtcacttcacctctctgagcctcggtttctacatctgcataacgacagcatatttaccattgatgtgacctacttcccacgcagggatgtggtcaggatggaaggaaatactgggcatgataggcctggataaccggtaaagaaccatgcaaaggcgaagacaaggagtgcagagagagctcatggttcctccaggctggttggcgatcaggctcatctcatctgcaccaactgctctacttgttagatggagaccttgcatcatgaatttctcgaaatgctcctggaacttatttatatgcctcaaaatcctctaaactcatttatagtaacccatagttttaattttataaataaacgtatttattaaatcttaaaaaaaaaaaaaaaa

SEQ ID NO: 65 - DNA, 1655 bp, Homo sapiens
ccacgcgtccgggcaaagaattaaacctggtgtttggacttcaacttagcatggctagaattggaagtacagtaaacatgaacctcatgggatggctgtattctaagattgaagctttgttaggttctgctggtcacacaaccctcgggatcacacttatgattgggggtataacgtgtattctttcactaatctgtgccttggctcttgcctacttggatcagagagcagagagaatccttcataaagaacaaggaaaaacaggtgaagttattaaattaactgatgtaaaggacttctccttacccctgtggcttatatttatcatctgtgtctgctattatgttgctgtgttcccttttattggacttgggaaagttttctttacagagaaatttggattttcttcccaggcagcaagtgcaattaacagtgttgtatatgtcatatcagctcccatgtccccggtgtttgggctcctggtggataaaacagggaagaacatcatctgggttctttgcgcatagcagccactcttgtgtcccacatgatgctggcctttacgatgtggaacccttggattgctatgtgtcttctgggactctcctactcattgcttgcctgtgcattgtggccaatggtggcatttgtagttcctgaacatcagctgggaactgcatatggcttcatgcagtccattcagaatcttgggttggccatcatttccatcattgctggtatgatactggattctcgggggtatttgtttttggaagtgttcttcattgcctgtgtttctttgtcacttttatctgtggtcttactctattggtgaatcgtgcccagggtgggaacctaaattattctgcaagacaaaggaagaaataaaatttcccatactgaatgagaagttaaaatgaatgtgtcagagaatgggcttaacacatcgttggtttgaaaacttccattttaaaaatttagagtttagtcattagaaaaaataatggactggaaagttatatttatatccaaatatacctatttcaaagtgtatttgtgaggcctgttttagcctgtgtcttttgtattgtgtgttgctaaagaattctacttttagtaggctaatcaacaatgaaagggttagaaaattgctgtggaacatccaggtgaacttcaggaaagacagtgaaaaatggaaaacgttggagcttctgttgagataatcttcattaggtatatatcttagggatacagccttttctttatcttatagcaggaaaaaaaaacttttgagggaaatagaagggctgcgttacacaaaataaacaatggcattgtcataggccttccttttactagtagggcataatgctagggaatatgtgaagatgtttttttgaagtctctttctgatcacgaacaatagcttgcgctctactctgtagttatgtggattgccgagcaatgacccttttcaatttcttatttctgtgttactgaggaccctaatcacttagggatgtaattttatagtataaactttctgtacagtttttcttatagtctaataagtaaaaagtgtccttcaaattatgataattgcctatgtacatggataaattaaaacactgcacacggaaaaaaaaaaaaaaaaa

SEQ ID NO: 66 - DNA, 6297 bp, Homo sapiens
ccacgcgtccggtcagctttcatctcgtcctatctttgttcaggcaaacttctctagttctgttttaataggcatatttgttaggtctgttttttgaaatcctcttttttacattgtttaaagataatgccttggctaaaaagcctgcttcacttttccctgtttttagttgttttctccacattggcagtaaagagccttggcgtcccagtagcagcaggttctcctttttgtattgtggatgttttgcatttcatactgttgtgaagagtggctttgatcatacatgttgttggtatatttgcctttttgctgggggtgtgagaagaaccagagatgagcagaggtacacccagtagacttcccagcctgcagagcctcccgggaagagcttccgtgttcaggtgcttggggccccaccctaggagcctgactcacagtcagagcagggtcccggcttgtgttcaggattttgaaacatttgtaaggtgattttgttgtttctacacctttctcctcatctttttttttttgtagttaatcgttactaataacagaaaagacatttttggcatggtaattggcacaaagtgaataattgttgaatagatgacttttgaggctttcaaaattcgagtgtccataaaatccatccagagccacctggttcctttttttgaaccacttaacgtaattctggaaaaccttgactgtgggtcttaagtttggtggattgctgcttctcactggctgacctttggaggtcgcatatttcaggatgtgattccacttaggctccatttcacctgacactgcaattctgtgccttcagagggatttgttattgcgaatgatgtggacaacaagcgctgctacctgctcgtccatcaagccaagaggctgagcagcccctgcatcatggtggtcaaccatgatgcctccagcatacccaggctccagatagatgtggacggcaggaaagagatcctcttctatgatcgaattttatgtgatgtcccttgcagtggagacggcactatgagaaaaaacattgatgtttggaaaaagtggaccaccttaaatagcttgcagctacatggcttacagctgcggattgcaacacgcggggctgaacagctggctgaaggtggaaggatggtgtattccacgtgttcactaaaccctattgaggatgaagcagtcatagcatctttactggaaaaaagtgaaggtgctttggagcttgctgatgtgtctaatgaactgccagggctgaagtggatgcctggaatcacacagtggaaggtaacctttcctcgagaactttcattctaaagagtaggtgcagcatcactgaagtagagtcaagtttcaaagcattcacgtgtgagtaacttgaataaatactacatctggttatgccaattagaatcaatttcggagtgttatttcatgacacatttcatgacaagtggcatgtttattcctggcagtggaaaagtttttttttctccacgtacagaaataaactcttttactctcatccctgtaagggtagctttgctttttttttttttttttaaattgggccgggattcaagccttgtttccaatatgaagtaattcattacaattttaggccagaaacagcctgaggcttgtttaaaaagaaaaaaactagatggaaaatgttattttataatgcttgtcctggtttttagaataaatgtatttcatctttgtttttaacagaatttatgtattaataatttggggattttctgtaaagattgttttgttttgtcttggcaaataatcttcctatctttggagtgaatgagaatcaccatttgtcacctttgagagaatggatactcctgccctgtgatttttgttggtattggatagtgctagtaatctggaatgtaccctgtggttctgcaggtaatgacgaaagatgggcagtggtttacagactgggacgctgttcctcacagcagacacacccagatccgacctaccatgttccctccgaaggacccagaaaagctgcaggccatgcacctggagcgatgccttaggatattaccccatcatcagaatactggagggttttttgtggcagtattggtgaaaaaatcttcaatgccgtggaataaacgtcagccaaaggtgagtttttctttttccaaaatgacataacatttgatcttgtacatttaagacaaaaactaaccggagtttagtagaagtacagaggaaagaggagcttcttgctgtgggcagcaggagagctgaccctgaatgagggggaatttcatttaaatatcaagttttccaaaaagcagaaatttctcataggtgataggtaagtggagaagtcagtgtttgggggaatgtattcctgccacactgtaaatccagttatttaataaaaattgaaaagacatgaaagattgctctgtggctctcaattggaagccccaggtttctgtgctctagttccttgtgagtggttcatttcaccaattacagatagcagagctctgctgaccccaagccagcccgggttcaccttggctgcaaggaatgatgacggccttgtccagacctggctagaaagatgcagcccggcctgtttgctatggatctaaactgcctgctggttcctttccaaggcaggccaggaaacagtggtgaaggagtgttgccctcatcctaacacgcagtcctttgtaatgcgtgctgtctcacctgtatcacgccagcattatttattagttcataaatcagccttccatgatgaaagaacctggcctggaatcaaagtctggaagtctgtatttctttaagatccatgcttgaaaattaggacaaaaaacgcttagctttggaggaacaaaaaggaaacagttccgcaaagagctccagcctttttctggggcacggtttgtgcagtttaacgttggaacgtacagcctcagacgggcaaagggggcgactgcacttctgccgccaccagggtttttctgtcaggttagaaagtatttcactttgaggctaaaagtctcacaaggtatcttaacgctgatggaatgttattttcatggaatcagtataagaaattatattgtaaagtattagatactttgcattcattcatactaggtttcagtagcttgtgttttagactttgcgcttgtcacattttaagtggtcagtgaccacaggcttgtggctgcccagctgcagagcacagtgcagtcacagaggagcctgtcttagagacgcgtgctttaggttggcctgcattagggcttacattgatgtttctgacgtgttaatacttacatagaaaggttttgacattttttcaattagccccttatgtatagtcttactttttagaacaacttattgtcattttctcgtttaaataatatgaatacttctctctttctgttactatgtcagtttcttattcacttagttcaacagatctagtgctagcatggcctgtgctgctgttggtcctactgggaacgcaggtagagtctccatggtcaggatgccgtgttctgttgtggtgctgaggcctgtaagcacttggctagaagttaggccagggaagctcacactgaccttggtatttgaaggtcccagaatgaggttgttgaggtagaacagagatgggagaacatgcccttggagctggactcaacaagaaggcccctctgggggaagctgaggttggacaggaagggcgtgtgccctcactgacttgctcacaggcttggggttcatctgttttggtttttgcttttttacattatattaacatggaaataaaaggtgttccctgggatgctcccggcttctctgctcagtagctttgtggctctgagtaaaatgaacttgcctgtgttgaaatatcctaatttttaaacttacttcatagggactgaggaattacgacttttatcaattttgtgacctgttaaaatgttaaaaaggacatgtattttttaaagatctttaagtaaaacattttgctcattcccaaagccaaatttaaattataccatggccctaattcagaagttcattctttggcaggtgtttccttggtgcctggggcactctctctttctcccagttcctgtggcagtttgtccaggtgcccaagaacaattcataccctcctttctcgttatttatatacttgtctttttgcccctgccgggtattttagaaatcgtgcttggtgcactttgtgtccttcagtgtgccttacccagagcagatgcacgataagcatttttacacgagaacaagctggtggtgtaggcctctgctaaggaacaggctgtatatgctctttgtgggattaaggtagaatcagctttaactccaaagaaactgtccatgaattttgtttataatagcaagtagatttaaaatgacactttgaaaaaattctgttgtctttctctacatataatgctgtagaaaaatataactgatggattttgtgaacgtggtatttttaacttttcgtagcagcacaaagaatgctcctctttgtgtgtcaatgaaattgttctttatgacagcttcagggtaaatctgcagagaccagagaaagcacacagctgagccctgcagatctcacagaagggaaacccacagatccctctaagctggaaagtccgtcattcacaggaactggtgacacagaaatagctcatgcaactgaggatttagagaataatggcagtaagaaagatggcgtgtgtgggtaagaaaagtggttatgtcttgatctaatacgctggtgtcttcacagtccttttggattaaatgggatcccagagccacttcttggtcggtttgagggggcagtacatgtgtggtatcaggcacatgcagtgtgagggctggactctgtggaagccggaaggtttcaacatctgccgcaaaccgttccatgttgcacagaactgacagaaaggaagaatgtgcttttggtattgaaggttaccacacattacagattgatttgtctcatcctgattccctttttagtcctcctccatcaaagaaaatgaagttatttggatttaaagaagatccatttgtatttattcctgaagatgacccattatttccacctattgagtaaggattcagcctttttaattattcatttaaagaaatttactatagagtatcaaatgtacaactgatcacatgtaaccattgttttgtatgtagttctgtctagctttttttttttttttaacctttttaactgcatattagagcaggatgaaactttagaggttactcaatcttttaatttaaggagaaagtaaacttttactttgtgaacatgatagataaaaaaaaactggaccgggcgcggtggctcacggctgtaatcccagcactttgggaggccgagacgggcggagcacgaggtcaggagattgagaccatcctggctgacacggtgaaaccccgtctctactaaaaatacaaaaaaaattagccgggcgtggtggcgggcacctgtagtcccagctactctggaggctgaggcaggagaatggcgtgaacctgggaggtggagcttgcagtgagccgagatcgcgccgctgcactccagcctgggcgacagagcgagactccgtctcaaaaaaaacaaaagaaaactggactgtgattatgaatctaaattagttgtgatcctgaacctaaattactcaattgagtatatagacgagtagccaaggttgtctagttcagtttctgtagaagaaatgaagagcagcatgggtgagggctaattagggatgacatagacagaatatagaggaaaagggtttaggacaagtctgacattcatctgtttcttattcattgaattttagaatctatttaccagggcggtcacttactgtcttttttaataactggtcctttgcatacatttgtaaaagtctattaaaaaataagtctcagccgggcacatcccagcacttggggaggctgaggcaggcagatcatgaggttaggagtttgagaccagtctgaccaatgtggtgaaaccccgtctttactaaaaatacaaaaaaaaattaggtgtggtggcgtgcacctataatcacagctgctcaggctgaggcaggagaaccgcttcaacccgggaggcagaggttgcagtgagctgagactgcgccactgcactccagcttggaagacagagcaagactccatatcaaaaaaaaaaaaaaa

SEQ ID NO: 67 - DNA, 3408 bp, Homo sapiens
ccacgcgtccggaggcaggaccttgtcctattcattaatcttgcccctcaacagttattttcagaggggcaagaagtgtttcagggttcttggcccttgtttgaccagtcgtcctaaccctcatgtcttgggtcattgttgttataatctggggttaccttttggaaggtcatggggtacccttttgcaaaagttatgggccctctccttggaaactgcacacacaccatgcagcttacaattcagggagttcacaggtctacagaatcctggaaactctcatgtccggttctactcattgtagcttcagtggaaccttctagcagtcctttccagctcctccccagctcctcagctctgcttccctccgcccatcaagccctcctcagcccataaggtgggccaggtggcctgtggggataaatcagagtgcccacaagtgcaggggcccaaagacatcccagagcaaacccaagaatccctctacaagccccagcccactcagaaggatgcattttgccccctctgtttatttgtttgtttttaattatgaaagtagggcatggtcattgttgagaatgtgagaaatgcagagaagttaaaatgatgctttttgtttagggcgctgctgcttctggcttaagatcctaaatcaaagcagctgccagatctggacctaagacttgcttcccatcaccttacataaaagaaagagcactggactaggaatcaaagatctgaattcccatcaaatctctgctattactagcttttatctctatttatttatttatctgtctatctatctagtaccttttgtgaatatgagtgtttctcaccgaggccctcccatctctcttgcccccgatcctggaatggaccaaataccttgtttactgaaggatacagatggcatgtgactgttgagaatcactcaccctcttagagccatggtttcctcttctataaaatagggatgttcgtgcctatttgctaatcatgagtgacaatgacataaggtacataaagctgtactgcatgatgcaaacataacatcatatttgtagggttgttgctaataatactatccatcagcaaagcagtcattcatttactcagtcaaatactgatgcactggtacattcagtttcctcttttgtaaaatggggataaaaataggacttagctcatagggtatttaagattcagtgagttaatatatataaaatacttagagcagtccttggaacatattaagaactcaatacatattagctagttgagcaggctgtagtatttgttccagccaagaaaagactgttctctaacagcacaggaaataaagatggggttaggcacgacacggcagcaggacttaccttctgtctaattcagctggcagtcaaagaaagaattattagaagcctatgagcttggtctcccaaagatctactgagtacagggggatatttaaagaataaaaatccctagacccacttacagtacaggagagacaagaagctgttcacacaataacaagtgctaaattccttgatttttatactgacagctgaagttttagagaagagaaggatcaataaagaccggaatattaaagcagacaggcctaaaagaggattttagatttgataaagaattcctccagttctcagagcagggactttggagggtaacaacttggatttcagtccttgcctgccacttactgattgtatgaccttggaaaagttacttcacttctgtgagcaatgattctctcatctggaaaacaaaacaaaacaaaaaaactaacaagggtgataataatacctacctccctacctcatagggctgatgagaagattaaaaagtacctacataaagcccttctctgcgtgcctggagcatggcaagggctccatgtgaaccactatttttttttttttttttaatgaaaagtcatgggcagcaccaaagctcagaattttggcagtaaggaattatgattctacattgaaatttgccagaaggggagctgactgcctcatgagacatttttgaatgaggccaaaaaaggaaacaagtgtatcctgggattttacgagatgctaggtatgtccttagcacttaatcctcatgactaccctatgatgtaagtactatctgttgtccctattttacagttggccaaggtcacatagctgaaacggacttctgtgtgtcttctaacttttgctttcaggtctggaaaaatgcaatgtaaacctagaccctctttgaaatactgaagatggtaatcttatcccttcctcactttctgttttctaaaataacagtccttgttccttacaatgtctgttttccagattcttagaagactttttgcttattttccataactctttacttgtgatccctgaatgacaccgggggtatagcagagaatgtccatttcctcaaagttcaaaggtcctacaaaaaatagttgctagcctggcatgatggtgtgtgcctgtggcctcagctacctgggaggctgaggcaggaggattgcttgagctgaggagtttgaggcgcagcgtgatcgcggctcaccgcagcctcccgggctcaagcattcctctcgcctcagcctcctgagtagctgggaccacagctccactaattttgaagtttttttggtagacatgaagtctccctgtgttgcccgggctggtctcaaactcctgacctcaagcagtcctcctgtcttggcctctggaaatgctgggattacaggcgtgagccactgtgctggcctcttttttctttttctttttttttaaggtttttatttgttaaatgggaagtctgtgccatcaactgagcattgtattttctccttagtaagagcctgggtgggccactgggagagaactatacattaaatgtaagtagcctctgggtagagagcccctggctggtttcctttcctttctctccttttctctactttggtgtctggaggcatttcccagactccagtttcttaccaccctcacggattttgctattgtattatcacctcctttatcattcccaaaattgactttatggagactcattaaaagaaagaatcatcggccgggagcggtggctcacgccacgaaggcgggcgaatcacctgaggtgcggagttcgtgaccagcctgaccaaaacagagaaaccccatctctactaaacaatacaaaattagctgggcgtggtggtgcacgcctgtaatcccagctactggggaggctgggacgggagaatcacttgaacccgggaggcagaggttgcagtgaccaaagatcgcactattgcactccagcctgggcaacaagagcaaaactctatctcaaaaaaaaaaaaaaaaaaaaaaaaaa

SEQ ID NO: 68 - DNA, 1663 bp, Homo sapiens
tcgacccacgcgtccgggcagtggggtgagggcacacaagcagttcagggtcccagcaggaagtggggctgcagggccggggtgggtcctgggcctggccatcaggcagcctagcaggttgttctgggcatggagggggcctggtgtggctgagggcatgcccagggctccctggaggatcccgctctgtgccctgcccaccctgtgcctggggagccctctgccctcacagcccacccaccccattttctatgaccacagagctccgacctggaagatggctcacccaggaggtcccaggagctctcactcccccaggacctggaggacacccagctctcagacaaaggctgccttgccggcggggggagcccgaaacagccctttgcagctctgcaccaggagcaggttttgcggaacccccatgtaaggcttccccggggtggggtcctcccagccgtgggcctcagggtgaccgatcacagggagagtggctccctgccctgggcaccccctgcggtggccccgacgacagctgaggagtgaccacaaggtctctgcccacagtgctcggggtgcggtgtctgggctgcgaagtggatccccctcctttcttgggcactgcagcagcttggggggctttttggacgtggatgtgcctggtcctggtttcccgagggcctttacagtggatgaggaggtgaacacaggagtcctgagagcaagcaccacctcgggctttgttgtagaaacaatggcccggaccccaggccggagccgtggcttggcctcctgggtgtgtcttggcatctgaaatgcaggctacccacaccggctcacctccaggggtacaggcaggtcccacagggagagcttggcgctgagctgaggctgtctgggctcctcgcctcccaaccagtctgcagttacaggggccagtggggggcgggtgagaaggacgggttccctcaggggagccggccggagcccgagccttcccccttctccaggacgcaggcctgagcagcggggagccgcccgagaaggagcggcggcgcctcaaagagagttttgagaactaccgcaggaagcgcgccctcaggaagatgcagaaaggatggcggcagggggaggaggaccgggagaacaccacgggcagcgacaacaccgacactgagggctcctagccgcagcagcgcaggccccgaccagggcacacccaccggcccggcctcctgccacccgggggtgccgacgccctggggcgcagacttccccgagccgtcgctgacttggcctggaacgaggaatctggtgccctgaaaggcccagccggactgccgggcattggggccgtttgttaagcggcactcattttgcggaggccatgcgggtgctcaccacccccatgcacacgccatctgtgtaacttcaggatctgttctgtttcaccatgtaacacacaatacatgcatgcattgtattagtgttagaaaacacagctgcgtaaataaacagcacgggtgacccgcaaaaaaaaaaaaaaaaaaaaaaaaaaaaaaaaaaaaaaaaaaaaaaaaaaaaaaaaaaaaaaaaaaaaaaaaaaaaaaaaaaaaaaaaaaaaaaaaaaaaaaaaaaaaaaaaaaaaaaaaaaaaaaaaaaa

SEQ ID NO: 69 - DNA, 2343 bp, Homo sapiens
agtcaggactcccaggacagagagtgcacaaactacccagcacagccccctccgccccctctggaggctgaagagggattccagcccctgccacccacagacacgggctgactggggtgtctgccccccttgggggggggcagcacagggcctcaggcctgggtgccacctggcacctagaagatgcctgtgccctggttcttgctgtccttggcactgggccgaagcccagtggtcctttctctggagaggcttgtggggcctcaggacgctacccactgctctccgggcctctcctgccgcctctgggacagtgacatactctgcctgcctggggacatcgtgcctgctccgggccccgtgctggcgcctacgcacctgcagacagagctggtgctgaggtgccagaaggagaccgactgtgacctctgtctgcgtgtggctgtccacttggccgtgcatgggcactgggaagagcctgaagatgaggaaaagtttggaggagcagctgacttaggggtggaggagcctaggaatgcctctctccaggcccaagtcgtgctctccttccaggcctaccctactgcccgctgcgtcctgctggaggtgcaagtgcctgctgcccttgtgcagtttggtcagtctgtgggctctgtggtatatgactgcttcgaggctgccctagggagtgaggtacgaatctggtcctatactcagcccaggtacgagaaggaactcaaccacacacagcagctgcctgactgcagggggctcgaagtctggaacagcatcccgagctgctgggccctgccctggctcaacgtgtcagcagatggtgacaacgtgcacttcggcctctccctgtactggaatcaggtccagggccccccaaaaccccggtggcacaaaaacctgactggaccgcagatcattaccttgaaccacacagacctggttccctgcctctgtattcaggtgtggcctctggaacctgactccgttaggacgaacatctgccccttcagggaggacccccgcgcacaccagaacctctggcaagccgcccgactgcgactgctgaccctgcagagctggctgctggacgcaccgtgctcgctgcccgcagaagcggcactgtgctggcgggctccgggtggggacccctgccagccactggtcccaccgctttcctgggagaacgtcactgtggacaaggttctcgagttcccattgctgaaaggccaccctaacctctgtgttcaggtgaacagctcggagaagctgcagctgcaggagtgcttgtgggctgactccctggggcctctcaaagacgatgtgctactgttggagacacgaggcccccaggacaacagatccctctgtgccttggaacccagtggctgtacttcactacccagcaaagcctccacgagggcagctcgccttggagagtacttactacaagacctgcagtcaggccagtgtctgcagctatgggacgatgacttgggagcgctatgggcctgccccatggacaaatacatccacaagcgctgggccctcgtgtggctggcctgcctactctttgccgctgcgctttccctcatcctccttctcaaaaaggatcacgcgaaagggtggctgaggctcttgaaacaggacgtccgctcgggggcggccgccaggggccgcgcggctctgctcctctactcagccgatgactcgggtttcgagcgcctggtgggcgccctggcgtcggccctgtgccagctgccgctgcgcgtggccgtagacctgtggagccgtcgtgaactgagcgcgcaggggcccgtggcttggtttcacgcgcagcggcgccagaccctgcaggagggcggcgtggtggtcttgctcttctctcccggtgcggtggcgctgtgcagcgagtggctacaggatggggtgtccgggcccggggcgcacggcccgcacgacgccttccgcgcctcgctcagctgcgtgctgcccgacttcttgcagggccgggcgcccggcagctacgtgggggcctgcttcgacaggctgctccacccggacgccgtacccgcccttttccgcaccgtgcccgtcttcacactgccctcccaactgccagacttcctgggggccctgcagcagcctcgcgccccgcgttccgggcggctccaagagagagcggagcaagtgtcccgggcccttcagccagccctggatagctacttccatcccccggggactcccgcgccgggacgcggggtgggaccaggggcgggacctggggcgggggacgggacttaaataaaggcagacgctgtttttctaccc

SEQ ID NO: 70 - DNA, 3091 bp, Homo sapiens
aaaccggaaagtttgtaggaaaattgctgcacatggcctttgcagaaaagagagccttcaaaacctcttacattccagtagaaaactctctctgcaagtccttaactttgttcactcattccaggaaggtgcttcaatattggatattcacacagagcccagtttttcaagtttgctttcacagtcatcgtatgctgacatgggtgttccacttcctgcaaaaaacttaatatttaaagatggtgtcttatcagaakggagtggacggtcaccttcctcacttcttattgctaatctccatttgcaataatttggttacaccatttgttgctcacactttctgccttttttctttcttaacgttagctttatagtgtcagccactaaaaagcatcctgctgctgcagtgcaattcttgcttaactaatattaaaagttggggaacatattcatgttttctgaagttttgctcattattgcacatcttattgcgacaaagtgctttttagcagccagcactgtattttttaccttgagacaatctgcatttcttttataaaactaagtatatactttataggctttatgatgactgttatgtttataagcagtcactatgaaaattgcaatggtaattttatatgttagtttatcaaacataaatcttgtttaattttatattttgttacctatactttgggggatcaagggaagagatggaactcttcctctgaaaaggcttcttggtacttaaagtagtaaaactataaaacaataaacatccagtattgagagatgatatgatagggcattatgaattcctatgggtgtctgtaaattatgtatgtcagttggacattgtagaaggtatgtaaatcagcatagttgtgtataacttaaccttgatttataaggtcttaagattatgactattcattgacatctcatgagaagctttagaagactttctatttttaaacaccatttatatgtggacttctgttgtcactgactttgggctttatattttcatagagtctttatggaaaaaatagaatttattttccactcttgtagctatagctgctgcacactttcaccctgatttatttttttgtttcttagctttgatgttttcaaaccaaggattgtgattttaggttagaattacatattagaagcattaagactatgtctttggatcagaatgctttagtgataaacctactttgaagacatactcttaagcaatctggatcttaaatttatgtgaatacttttttagaaaatgataaagaaaaatggaattacttcaaagtgtttcttgagtcattgattcttttagcatctcaaatgttaattagaataattggaatcactttttagacttttcaagttaccttccttgggaagtttgtgcagtgttatagtttagtttagctcctcttacagggtaatggtttgctagtttaaaactgtaaccaaacgaactggtcagacaacatatatctaaaacacttaaaatgttaggaagtttgggaatgttataacctaaacgtttttgctggtaactttttgttatttatagatatttgtgtatttaacatacatacttcaggaaatatatgcctttcctaaaacttaaccatgcattcaataccatggcctatctatagaattgaatattttggaccatgttatctgtggcacagtcagtgctgtgtttgaggtaaatgcagtaacggttagttttctactttgtcttatagaaggtagaaaccatgtgtatgttatgtttgtctataaaagaaaaaatactaatattaaataatttcttacgactctgagtcactcacttatttttccaataattgatattgtacattcctagtgccattaggtatgtatgtatgtaacttttacagtttttcagctgaaagttgtaagtattttttttttttgatcggggctctttaatctcattttaatttcctttgtttgaactgtagttatttattcctatattaaccatctaaaccaactgtaatgacatgtacactaatacagaattgaacatttgtagttgttggcagtgaacccagttgttggtgaatttaaagcttaaaatatgggaatgatttgctgctatatttcctttgagagagaaaggaggaagaaatagaacctaatagtgatcatgaattttagggaaagtaccgaagaaccatggggtcccctctggtttcttgtgttgaatgaggcaagggtaatcatctgattccgagctgaagacctctggtcctcttaaggagggagagtgcatttttagagcttttagcaaaatgtgaaaagctgatgtttgcgccttgctttgtgaatttggctttgttttacttatacattaactcatgtaatctcttaaatcttacaagcattgatccatttcaacaaaaaggtaaatttaaaatgcagactttgttatttgccaaagaagattcatgaaaaatttacgtccaattattttgcaaatagttaatttcatttggctttttaccatgttccttcctttctttttcccgcttccttaatgtaatttaaaccctggcaaacattctttagaaaccaagaggaaagaaagaacaaatatcaaaaaagacatagaatttaatattgatacaatttcacctctaaaatggatttgaagaaatgcaactttatatcaaaaaatgtcatctgatttcctttgtttcttttttaaattatgtaatcagatgattttatgtttttttttcaggggagcggaatattggtttcttttacttgttgttttcagttttctctgccattcatgtttcttttttgtgttcagtgtttcaaatacaatttgtatttaaggattttaaaataccaaactgtaactgagtacagtggatcgttttctgttaggatgttaatattatacaatgaaatctataaagtgttgtcaatttgattattgacacatataacatgtttacaaataaactgtggtattgatcaagttactatgaaaaaaaaaaaaaacccggggggggccccggaacccaatccc

SEQ ID NO: 71 - DNA, 2916 bp, Homo sapiens
ccacgcgtccgctagcccgggcggagccacagtcctagaggctgagcgcagtcggagctgtcccatttacccgacccgacgccggcgtgatgtggcttccgctggtgctgctcctggctgtgctgctgctggccgtcctctgcaaagtttacttgggactattctctggcagctccccgaatcctttctccgaagatgtcaaacggcccccagcgcccctggtaactgacaaggaggccaggaagaaggttctcaaacaaggaatccattacattgggcgtatggaagagggcagcattggccgttttatcttggaccagatcactgaagggcagctggactgggctcccctgtcctctccttttgacatcatggtactggaagggcccaatggccgaaaggagtaccccatgtacagtggagagaaagcctacattcagggcctcaaggagaagtttccacaggaggaagctatcattgacaagtatataaagctggttaaggtggtatccagtggagcccctcatgccatcctgttgaaattcctcccattgcccgtggttcagctcctcgacaggtgtgggctgctgactcgtttctctccattccttcaagcatccacccagagcctggctgaggtcctgcagcagctgggggcctcctctgagctccaggcagtactcagctacatcttccccacttacggtgtcacccccaaccacagtgccttttccatgcacgccctgctggtcaaccactacatgaaaggaggcttttatccccgagggggttccagtgaaattgccttccacaccatccctgtgattcagcgggctgggggcgctgtcctcacaaaggccactgtgcagagtgtgttgctggactcagctgggaaagcctgtggtgtcagtgtgaagaaggggcatgagctggtgaacatctattgccccatcgtggtctccaacgcaggactgttcaacacctatgaacacctactgccggggaacgcccgctgcctgccaggtgtgaagcagcaactggggacggtgcggcccggcttaggcatgacctctgttttcatctgcctgcgaggcaccaaggaagacctgcatctgccgtccaccaactactatgtttactatgacacggacatggaccaggcgatggagcgctacgtctccatgcccagggaagaggctgcggaacacatccctcttctcttcttcgctttcccatcagccaaagatccgacctgggaggaccgattcccaggccggtccaccatgatcatgctcatacccactgcctacgagtggtttgaggagtggcaggcggagctgaagggaaagcggggcagtgactatgagaccttcaaaaactcctttgtggaagcctctatgtcagtggtcctgaaactgttcccacagctggaggggaaggtggagagtgtgactgcaggatccccactcaccaaccagttctatctggctgctccccgaggtgcctgctacggggctgaccatgacctgggccgcctgcacccttgtgtgatggcctccttgagggcccagagccccatccccaacctctatctgacaggccaggatatcttcacctgtggactggtcggggccctgcaaggtgccctgctgtgcagcagcgccatcctgaagcggaacttgtactcagaccttaagaatcttgattctaggatccgggcacagaagaaaaagaattagttccatcagggaggagtcagaggaatttgcccaatggctggggcatctcccttgacttacccataatgtctttctgcattagttccttgcacgtataaagcactctaatttggttctgatgcctgaagagaggcctagtttaaatcacaattccgaatctggggcaatggaatcactgcttccagctggggcaggtgagatctttacgccttttataacatgccatccctactaataggatattgacttggatagcttgatgtctcatgacgagcggcgctctgcatccctcacccatgcctcctaactcagtgatcaaagcgaatattccatctgtggatagaacccctggcagtgttgtcagctcaacctggtgggttcagttctgtcctgaggcttctgctctcattcatttagtgctacgctgcacagttctacactgtcaagggaaaagggagactaatgaggcttaactcaaaacctgggcatggttttggttgccattccataggtttggagagctctagatctcttttgtgctgggttcagtggctcttcaggggacaggaaatgcctgtgtctggccagtgtggttctggagctttggggtaacagcaggatccatcagttagtagggtgcatgtcagatgatcatatccaattcatatggaagtcccgggtctgtcttccttatcatcggggtggcagctggttctcaatgtgccagcagggactcagtacctgagcctcaatcaagccttatccaccaaatacacagggaagggtgatgcagggaagggtgacatcaggagtcagggcatggactggtaagatgaatactttgctgggctgaagcaggctgcagggcattccagccaagggcacagcaggggacagtgcagggaggtgtggggtaagggagggaagtcacatcagaaaagggaaagccacggaatgtgtgtgaagcccagaaatggcatttgcagttaattagcacatgtgagggttagacaggtaggtgaatgcaagctcaaggtttggaaaaatgacttttcagttatgtctttggtatcagacatacgaaaggtctctttgtagttcgtgttaatgtaacattaataaatttattgattccattgctttaaaaaaaaaaaaaaaaaaaaaaaaaaaaaaaaaa

SEQ ID NO: 72 - DNA, 1748 bp, Homo sapiens
agacgttccctcgcggccctggcacctccaaccccagatatgctgctgctgctgctgctgcccctgctctgggggagggagagggtggaaggacagaagagtaaccggaaggattactcgctgacgatgcagagttccgtgaccgtgcaagagggcatgtgtgtccatgtgcgctgctccttctcctacccagtggacagccagactgactctgacccagttcatggctactggttccgggcagggaatgatataagctggaaggctccagtggccacaaacaacccagcttgggcagtgcaggaggaaactcgggaccgattccacctccttggggacccacagaccaaaaattgcaccctgagcatcagagatgccagaatgagtgatgcggggagatacttctttcgtatggagaaaggaaatataaaatggaattataaatatgaccagctctctgtgaacgtgacagccttgacccacaggcccaacatccttatccccggtaccctggagtctggctgcttccagaatctgacctgctctgtgccctgggcctgtgagcaggggacgccccctatgatctcctggatggggacctctgtgtcccccctgcacccctccaccacccgctcctcagtgctcaccctcatcccacagccccagcaccacggcaccagcctcacctgtcaggtgaccttgcctggggccggcgtgaccacgaacaggaccatccaactcaatgtgtcctaccctcctcagaacttgactgtgactgtcttccaaggagaaggcacagcatccacagctctggggaacagctcatctctttcagtcctagagggccagtctctgcgcttggtctgtgctgttgacagcaatccccctgccaggctgagctggacctggaggagtctgaccctgtacccctcacagccctcaaaccctctggtactggagctgcaagtgcacctgggggatgaaggggaattcacctgtcgagctcagaactctctgggttcccagcacgtttccctgaacctctccctgcaacaggagtacacaggcaaaatgaggcctgtatcaggagtgttgctgggggcggtcgggggagctggagccacagccctggtcttcctctccttctgtgtcatcttcattgtagtgaggtcctgcaggaagaaatcggcaaggccagcagcggacgtgggagacataggcatgaaggatgcaaacaccatcaggggctcagcctctcagggtaacctgactgagtcctgggcagatgataacccccgacaccatggcctggctgcccactcctcaggggaggaaagagagatccagtatgcacccctcagctttcataagggggagcctcaggacctatcaggtcaagaagccaccaacaatgagtactcagagatcaagatccccaagtaagaaaatgcagaggctcgggcttgtttgagggttcacgacccctccagcaaaggagtctgaggctgattccagtagaattagcagccctcaatgctgtgcaacaagacatcagaacttattcctcttgtctaactgaaaatgcatgcctgatgaccaaactctccctttccccatccaatcggtccacactccccgccctggcctctggtacccaccattctcctctgtacttctctaaggatgactactttagattccgaatatagtgagattgtaacgtgaaaaaaaaaaaaaaaaaaaaaaaa

SEQ ID NO: 73 - DNA, 1277 bp, Homo sapiens
  misc_feature (1207)..(1207): n equals a,t,g, or c
  misc_feature (1272)..(1272): n equals a,t,g, or c
cgtttattcagcagaacatcagcttcctgctgggctacagcatccctgtgggctgtgtgggcctggcatttttcatcttcctctttgccacccccgtcttcatcaccaagcccccgatgggcagccaagtgtcctctatgcttaagctcgctctccaaaactgctgcccccagctgtggcaacgacactcggccagagaccgtcaatgtgcccgcgtgctggccgacgagaggtctccccagccaggggcttccccgcaagaggacatcgccaacttccaggtgctggtgaagatcttgcccgtcatggtgaccctggtgccctactggatggtctacttccagatgcagtccacctatgtcctgcarggtcttcacctccacatcccaaacattttcccagccaacccggccaacatctctgtggccctgagagcccagggcagcagctacacgatcccggaagcctggctcctcctggccaatgttgtggtggtgctgattctggtccctctgaaggaccgcttgatcgaccctttactgctgcggtgcaagctgcttccctctgctctgcagaagatggcgctggggatgttctttggttttacctccgtcattgtggcaggagtcctggagatggagcgcttacactacatccaccacaacgagaccgtgtcccagcagattggggaggtcctgtacaacgcggcaccactgtccatctggtggcagatccctcagtacctgctcattgggatcagtgagatctttgccagcatcccaggcctggagtttgcctactcagaggccccgcgctccatgcagggcgccatcatgggcatcttcttctgcctgtcgggggtgggctcactgttgggctccagcctagtggcactgctgtccttgcccgggggctggctgcactgccccaaggactttgggaacatcaacaattgccggatggacctctacttcttcctgctggctggcattcaggccgtcacggctctcctatttgtctggatcgctggacgctatgagagggcgtcccagggcccagcctcccacagccgtttcagcagggacaggggctgaacaggccctattccagcccccttgcttcactctaccggacagacggcagcagtcccagctctggtttccttctcggtttattctgttagaatgaaatggttcccataaataangggcatgagcccttcctcaaaaaaaaaaaaaaaaaaaaaaaaaaaaaaaaaaaaaaaaaaaaaanaaaaa

SEQ ID NO: 74 - DNA, 766 bp, Homo sapiens
  misc_feature (670)..(670): n equals a,t,g, or c
  misc_feature (713)..(713): n equals a,t,g, or c
  misc_feature (721)..(721): n equals a,t,g, or c
  misc_feature (728)..(728): n equals a,t,g, or c
  misc_feature (731)..(731): n equals a,t,g, or c
  misc_feature (756)..(756): n equals a,t,g, or c
ggcgagacgcgttcaccaccatatgcactgttgtcaactcccctggagatgcgcccaagccccacaggaagccttcctcctctgcctcctcttcctcatcctcgtcctcgttctccttggatgcagccggggcctccctggccacactccctggaggctccatcctgcagccgcggccctccttgcccctctcctccacgatgcacttggggcctgtggtttccaaggccctgagtacctcttgccttgtttgctgcctctgccaaaacccggccaacttcaaggaccttggggacctctgtgggccctactaccctgaacactgcctccccaaaaagaagccaaaactcaaggagaaggtgcggccagaaggcacctgtgaggaggcctcgctgccgcttgagagaacactcaaaggtcccgagtgtgcagctgccgccactgccgggaagccccccaggcctgacggcccagctgacccggccaagcagggcccactgcgcaccagtgcccggggcctgtcccggaggctgcagagctgctactgctgtgatggccgggaggatgggggcgaggaggcagccccagccgacaagggtcgcaaacatgagtgcagcaaggaggctccggcagagcccggcggggaggcccaggaagcactgggtgmatnaagcctgttmccgtgttggaccgggggggttttaactggtggncggggaantcttttnggnttgcaagaggccaattaaagttggnccttggaaaa

SEQ ID NO: 75 - DNA, 2181 bp, Homo sapiens
  misc_feature (5)..(5): n equals a,t,g, or c
gtacnggattcccgggtcgacccacgcrtccggcaggcagaggggcagtgggcgcggggaagatgattctgggcctcccccatctactgtcattaaccaaaatgaaacatttgccaacataatttttaaacctactgtagtacaacaagccaggattgcccagaatggaattttgggagactttatcattagatatgacgtcaatagagaacagagcattggggacatccaggttctaaatggctattttgtgcactactttgctcctaaagaccttcctcctttacccaagaatgtggtattcgtgcttgacagcagtgcttctatggtgggaaccaaactccggcagaccaaggatgccctcttcacaattctccatgacctccgaccccaggaccgtttcagtatcattggattttccaaccggatcaaagtatggaaggaccacttgatatcagtcactccagacagcatcagggatgggaaagtgtacattcaccatatgtcacccactggaggcacagacatcaacggggtcctgcagagggccatcaggctcctcaacaagtacgtggcccacagtggcattggagaccggagcgtgtccctcatcgtcttcctgacggatgggaagcccacggtcggggagacgcacaccctcaagatcctcaacaacacccgagaggccgcccgaggccaagtctgcatcttcaccattggcatcggcaacgacgtggacttcaggctgctggagaaactgtcgctggagaactgcggcctcacacggcgcgtgcacgaggaggaggacgcaggctcgcagctcatcgggttctacgatgaaatcaggaccccgctcctctctgacatccgcatcgattatccccccagctcagtggtgcaggccaccaagaccctgttccccaactacttcaacggctcggagatcatcattgcggggaagctggtggacaggaagctggatcacctgcacgtggaggtcaccgccagcaacagtaagaaattcatcatcctgaagacagatgtgcctgtgcggcctcagaaggcagggaaagatgtcacaggaagccccaggcctggaggcgatggagagggggacmccaaccacatcgagcgtctctggagctacctcaccacaaaggagctgctgagctcctggctgcaaagtgacgatgaaccggagaaggagcggctgcggcagcgggcccaggccctggctgtgagctaccgcttcctcactcccttcacctccatgaagctgagggggccggtcccacgcatggacggcctggaggaggcccacggcatgtcggctgccatgggacccgaaccggtggtgcagagcgtgcgaggagctggcacgcagccaggacctttgctcaagaagccataccagccaagaattaaaatctctaaaacatcagtggatggtgatccccactttgttgtggatttccccctgagcagactcaccgtgtgcttcaacattgatgggcagcccggggacatcctcaggctggtctctgatcacagggactctggtgtcacagtgaacggagagttaattggggcacccgcccctccaaatggccacaagaaacagcgcacttacttgcgcactatcaccatcctcatcaacaagccagagagatcttatctcgagatcacaccgagcagagtcatcttggatggtggggacagactggtgctcccctgcaaccagagtgtggtggtggggagctggggkctggaggtgtccgtgtctgccaacgccaatgtcaccgtcaccatccagggctccatagcctttgtcatcctcatccacctctacaaaaagccggcgcccttccagcgacaccacctgggtttctacattgccaacagcgagggcctttccagcaactgccacggactgctgggtcagttcctgaatcaggatgccagactcacagaagaccctgcagggcccagccagaacctcactcaccctctgctccttcaggtgggagaggggcctgaggccgtcctaacagtgaaaggccaccaagtcccagtggtctggaagcaaaggaagatttacaacggggaagagcagwtagaytgytggtttgccaggaacatgccgccaaactgattgacggggagtacaggattacctggcat

SEQ ID NO: 76 - DNA, 2207 bp, Homo sapiens
ccacgcgtccggaaaaagggaaaagatgccgtgtaaaatctcgttctgtgtctgaattgccgtagggctcagatcttcatttgaggttctgtgtctgaattgccgtagggctcagatcttcatttgaggttatgttctataagttaacgttgatcttgtgtgagctttcggtagctggagtaacacaggcggcctcacagcgacctctccagcgccttccaaggcacatctgcagccagcgtagctcctcctgggagatgcctcctcaaggccctgctccagaccacgtggggagggcctgacagccaattcccaggctgtccccacccttggagagtgaccctaaacgctagacagatggggaatgggaaagaaaagaaagctgcagacctcaagttaaaattccctcaaaaacgtttttatttatctgctttttctgaaaggataaaggctttttgaaaattattttctaacaaataacatgaacacttctagaaaccctagaaaaacacaaagtattcaaaatagaaagaaaaattacccattactctttaagccagcattatccattgcggtgcttttggagttgggtgaggccgtagcctctgccaagtcaaggagcccggtggtggctgtggcattcctgcagggttgtttttttttctttgagatggagtctcactcttgtcaccccagctggaatgtggtggtgtaaacagctcactgcagccttgaccctgaggctcaagcgatccttctgccttggcctcctgagtagctgggatcccaggcgagagtcaccacaccctgtccatgttcctgcaggtcttgatatgcgaggacgctgtgtcttccctgccacattttcttcttctttcttgagacagacccttgctccatcacccaggccagagtgtggtggtgcgaacacggctcactgcagcctcgaccctcaggctcaagcgatcctcacgcctcggacccccaaagtgctgggatcacaggcgagagtcaccatgctggcctgaatcttcagggtattttacggttgaagtgtcacttacttaaccatccctgtttcaagagtgtaggtggtcaccctgtctctgccgctgacctggcctggaccctcggctgtgagagggaggggtgggctgggctggaggaacctgaagccctcgtgatgtcacaagcccatctggctgggcatcccctgctgtgtcctgagctgcacatgccccaggtggcccccacagcagaggcgagccactggagggtggagggcttccacgggacggtcttcagggggagaaggaagggcccaggcccccaggagactcaggagaccagagcctggggtcaggggctcagccaggggctcagccagggctggatgtccggagccagccccgcagccctgtgttctttgttcttcgcactcccaccgtccgtgtgaacagctccagccccacctgcgcctccctgtgctgggctccatcagggagcccagaagacgtgtgtgcttctgaaattgggtccctacatgcctttgtcccagtgcaccttgctccttccatttactatcgagatttaaatgcctgttttctccccagaggttgacggatatattcagacgttacgacacggatcaggacggctggattcaggtgtcgtacgaacagtacctgtccatggtcttcagtatcgtatgaccctggcctctcgtgaagagcagcacaacatggaaagagccaaaatgtcacagttcctatctgtgagggaatggagcacaggtgcagttagatgctgttcttcctttagattttgtcacgtggggacccagctgtacatatgtggataagctgattaatggttttgcaactgtaatagtagctgtatcgttctaatgcagacattggatttggtgactgtctcattgtgccatgaggtaaatgtaatgtttcaggcattctgcttgcaaaaaaatctatcatgtgcttttctagatgtctctggttctatagtgcaaatgcttttttagccaataggaattttaaaataacatggaacttacacaaaaggcttttcatgtgccttacttttttaaaaaggagtttattgtattcattggaatatgtgacgtaagcaataaagggaatgttagacgtgtaaaaaaaaaaaaaaagggcggccgctctagaggatcc

SEQ ID NO: 77 - DNA, 3533 bp, Homo sapiens
  misc_feature (44)..(44): n equals a,t,g, or c
ttttatttacttcaaattaactgtactttactcaaatagaaaangaataattttcacattatgaagctacacaattccaaaatacacatgctgaggctctttttaagtccgaattgtctagtaattacaaaaaagtgaagagtttacagatatacaaggaaataaaggcgaattattgcaaagaaaacaagtttaatttcactttgaatgacaacgatttttctggaaagcagatacttcactcctttaagtttccacccaagccacaataatttcaaacggtcttgcggatgacccagctggtcactcttgtttatgtggggactggaggtaatgagagccaaaaaaagtgctataaacctaatttggctagagcaagttcacacgacacgaccgtgctttaaaaacttgctctccattatgtacttccttccatcaggttggggaaaaaaaaatggtggggatggtgagtaaacacaccagtggtttcatcagaggggaactcactactcaggaggtgacggtgacgtggtgccggtccctgaagtacgcgcacaagctccggaggttgcgggagcttccgctgccgcctggagggaagccggagcgacgggggtcacggcggcggtcagagggtaaaggtcttgctcccagcagcctccgcggtggatacgtcgccatcttggatccgcgggacaagaaaattcatgcgagggagacgtggtgggcggtccttcctgtgacacgacccttgagtgacagttctatttgattgcctccggtactgtgaggaaaggacacgactctatggtgaggactgatggacatacattatctgagaaaagaaactaccaggtgacaaacagcatgtttggtgcttcaagaaagaagtttgtagagggggtcgacagtgactaccatgacgaaaacatgtactacagccagtcttctatgtttccacatcggtcagaaaaagatatgctggcatcaccatctacatcaggtcagctgtctcagtttggggcaagtttatacgggcaacaaagtgcactaggccttccaatgagggggatgagcaacaatacccctcagttaaatcgcagcttatcacaaggcactcagttaccgagccacgtcacgccaacaacaggggtaccaacaatgtcacttcacacgcctccatctccaagcaggggtattttgcctatgaatcctargaatatgatgaaccactcccaggttggtcagggcattggaattcctagcaggacaaatagcatgagcagttcagggttaggtagccccaacagaagctcgccaagcataatatgtatgccaaagcagcagccttctcgacagccttttactgtgaacagtatgtctggatttggaatgaacaggaatcaggcatttggaatgaataactccttatcaagtaacatttttaatggaacagacggaagtgaaaatgtgacaggattggacctttcagatttcccagcattagcagaccgaaacaggagggaaggaagtggtaacccaactccattaataaaccccttggctggaagagctccttatgttggaatggtaacaaaaccagcaaatgaacaatcccaggacttctcaatacacaatgaagattttccagcattaccaggctccagctataaagatccaacatcaagtaatgatgacagtaaatctaatttgaatacatctggcaagacaacttcaagtacagatggacccaaattccctggagataaaagttcaacaacacaaaataataaccagcagaaaaaagggatccaggtgttacctgatggtcgggttactaacattcctcaagggatggtgacggaccaatttggaatgattggcctgttaacatttatcagggcagcagagacagacccaggaatggtacatcttgcattaggaagtgacttaacaacattaggcctcaatctgaactctcctgaaaatctctaccccaaatttgcgtcaccctgggcatcttcaccttgtcgacctcaagacatagacttccatgttccatctgagtacttaacgaacattcacattagggataagctggctgcaataaaacttggccgatatggtgaagaccttctcttctatctctattacatgaatggaggagacgtattacaacttttagctgcagtggagctttttaaccgtgattggagataccacaaagaagaacgagtatggattaccagggcaccaggcatggagccaacaatgaaaaccaatacctatgagaggggaacatattacttctttgactgtcttaactggaggaaagtagctaaggagttccatctggaatatgacaaattagaagaacggcctcacctgccatccaccttcaactacaaccctgctcagcaagccttctaaaaaaaaaaaaaaaaaaaaaaaaaaagacttcccttttcttggggtatggctgtctcagcacaatactcaacataactgcagaactgatgtggctcaggcaccctggttttaattccttgaggatctggcaattggcttacgcaaaaggtcaccatttgaggtcctgccttactaattatgtgctgcccaacaactaaatttgtaatttgtttttctctagtttgagcagggtctgaattttttcatttatttccttttttgccagcagacagacttgagtctgtaaagacaagcaaatacactgacagaagtttaccatagtttctaaaatgtaaaaaagaaaacccccaaaagactcaagaaaattagaccacaaattttgcattgttcattgtagcactattggtaataaaataacaaatgtttgtgcatttttatgtgaagatccttctcgtatttcatttggaaagatgagcaagaggtctgcttccttcattttacttccccttctgtttttgaaaggcagtttcgccaagcttaatgcaagaatatctgactgtttagaagaaagatattgccacaatctctggatggttttccagggttgtgttattactgagcttcatctttccagaatgagcaaaacactgtccagtctttgttacgattttgtaataaatgtgtacattttttttaaatttttggacatcacatgaataaaggtatgtatgtacgaatgtgtatatattatatatatgacatctattttggaaaatgtttgccctgctgtacctcatttttaggaggtgtgcatggatgcaatatatgaaaatgggacattctggaactgctggtcaggggactttgtcgccctgtgcactaaaagggccagattttcagcagccaaggacatccatacccaagtgaatgtgatgggacttaaaagaagtgaactgagacaattcactctggctgtttgaacagcagcgtttcataggaagagaaaaaaagatcaatcttgtattttctgaccacataaaggcttcttctctttgtaataaagtagaaaagctctcctcaaaaaaaaaaaaaaaaaactcgag

SEQ ID NO: 78 - DNA, 867 bp, Homo sapiens
ggcacgagcaggtactgggtgactgcctggctgaggaaaagttaactagacacttggggaaaggagatccaagggagtaagaggcaaaatgcctttgcatgcttttcttcctatctctttttctttctctccttctcactctctcccttccttcctttcttcctttctctttcttttttttttctcttttcccccacctctctgcctgcctccttccttccctcccctcccctcccttccccctccctccctccctcccttccttccttccttccttccttccttccttccttccctccctcctctctccctccttccctgccttctttccttcgttctgccaacttgccagaaggagcccaagaaaaagcacccagatgcttcagtcaacttcttagaattcttcttttttttatgttcagaaaagatggaaattcatttctgctaaagagaaagaaaaaattggaagacagggtgaaggtgaacaggcccattataagaaagaaacaaaaatctatattctgtctacaaggaagcgagagagagaaagagagagaagaaagaagttccaggattctaatgtaccaaagggatctcctttttcttgttttgttctgaaaatttcaccaaaagagcacaggagaacatcttggctaattcattggcgatgatgtaagaaaactgagagaaatgaaagaaatgaagaattactgctgcagataatatacagccttgaggaaagaaaggcttttaagattatagatataaaggctattgctgtattctgggataaaagaaagtctgatgtcagggaaaggggaagttggaaaaactggaaaaagaaaaaagaaaaaaaaaaaaaaaaaa

SEQ ID NO: 79 - DNA, 1558 bp, Homo sapiens
ggttttggagtatatatattgtatgccatgaactatatttttctgcttatggctttgcctcatttaattgccatagcacttacatggggcaggtattcattttcctgcttagcaaataaggaaactgaatttcagagatgtcaggtaacctgcctacttcacacactaggagttttgatgtttaattttgaactaagatctatctggcttgaaagctctttgcattaaacaaccttgaacaatatacttggaacgtaggtgtgtttttggcacagaacatggcatgtgtgtgagggattgaacacagacttgcccagattcaaacttaccaatcttctgtttcatgtgcccagaagaaacagcctgtttctcagcctcaaacccaaacttctagttgtcttgattggttcagcctgactgtccaactctgatttatagctgtgattgggggagctgagattacacagtgtaggcaggcagaagggccccaggcctattgatatgggtgaggacaatactcacgcactcccttcacttactcactcttccaaggtcttggcttgaacccaattttttttgagagaataaaccaggctttttgttctccacttggcctgactccatttctggcattccagccatgtatttagctgttatcagctttcagatttagascaaagccttgtttccaataagcttgtttctctgaagtaattgttaaaatataattttcagaaaaaggttaaatcatgactcatacaaatataaaaatgaacatgtgctaaagatttttatttcactcatgtgatatgaagtaaccagacagaagttataaccagtacatatggaaagtcaaaaagcacaaattcatatgtagtaaaggaattggattgcaaatgaaggcaaaactgtttttyctacagggtggagggaagataatcaaaatgctagaaccagaatttscatgcctgtcacttagcttcaatttacaaaagcccagaataactcaaaggcaaattctagccctgcaaatatcagccctaaagctgtgctgtggccagtgcatagttttctattgaagtacaattttttccccaaatacattatctctcagagggagtccaaattgcttccctttcactcagcagatctgttcagtcaacagatgttaaatagctacagcgtatcaggcacaaataattctttataaaataaagtaacaaactatatgttgtttcaaagttccagttaaggccagccgtggtagctcacccttataatcccaacactgggaggccgaggcaggcggatcacttgggctaggagttccataccagcatggccaacatggtgaaaccctgctctactagaatgcaaagattagccaggtgtggtggcgcatgccggtagtccaggctactcaggtggctgaggcacaggaatggcttgagcctgggaggcggaggttgcagtgagccgagattgcgwccgctgcactccagcctgggcaacactgtgagactcctgtctacaaaaaaaaaaaaaaaaaaaactcgta

SEQ ID NO: 80 - DNA, 2199 bp, Homo sapiens
ggcacgagcttttccatcttgagcttggcagcctgtctagttgtggaagctgtggtgtggaaatcggtgaccaagaatcggacttcttatatgcgccacacctgcatagtgaatatcgctgcctcccttctggtcgccaacacctggttcattgtggtcgctgccatccaggacaatcgctacatactctgcaagacagcctgtgtggctgccaccttcttcatccacttcttctacctcagcgtcttcttctggatgctgacactggggcctcatgctgttctatcgcctggttttcattctgcatgaaacaagcaggtccactcagaaagccattgccttctgtcttggctatggctgcccacttgccatctcggtcatcacgctgggagccacccagccccgggaagtctatacgaggaagaatgtctgttggctcaactgggaggacaccaaggccctgctggctttcgccatcccagcactgatcattgtggtggtgaacataaccatcactattgtggtcatcaccaagatcctgaggccttccattggagacaagccatgcaagcaggagaagagcagcctgtttcagatcagcaagagcattggggtcctcacaccactcttgggcctcacttggggttttggtctcaccactgtgttcccagggaccaaccttgtgttccatatcatatttgccatcctcaatgtcttccagggattattcattttactctttggatgcctctgggatctgaaggtacaggaagctttgctgaataagttttcattgtcgagatggtcttcacagcactcaaagtcaacatccctgggttcatccacacctgtgttttctatgagttctccaatatcaaggagatttaacaatttgtttggtaaaacaggaacgtataatgtttccaccccagaagcaaccagctcatccctggaaaactcatccagtgcttcttcgttgctcaactaagaacaggataatccaacctacgtgacctcccggggacagtggctgtgcttttaaaaagagatgcttgcaaagcaatggggaacgtgttctcggggcaggtttccgggagcagatgccaaaaagactttttcatagagaagaggctttcttttgtaaagacagaataaaaataattgttatgtttctgtttgttccctccccctcccccttgtgtgataccacatgtgtatagtatttaagtgaaactcaagccctcaaggcccaacttctctgtctatattgtaatatagaatttcgaagagacattttcactttttacacattgggcacaaagataagctttgattaaagtagtaagtaaaaggctacctaggaaatacttcagtgaattctaagaaggaaggaaggaagaaaggaaggaaagaagggagggaaacagggagaaagggaaaaagaagaaaaagagaaagatgaaaataggaacaaataaagacaaacaacattaagggccatattgtaagatttccatgttaatgatctaatataatcactcagtgcaacattgagaatttttttttaatggctcaaaaatggaaactgaaagcaagtcatggggaatgaatactttgggcagtatcttcctcatgtcttcttagctaagaggaggaaaaaaaggctgaaaaaatagggaggaaattccttcatcagaacgacttcaagtggataacaatatttataagaaatgaatggaaggaaatatgatcctcctgagactaactttgtatgttaaggtttgaactaagtgaatgtatctgcagaggaagtattacaaagatatgtcattagatcccaagtgctgattaaatttttatagtttatcagaaaagccttatattttagtttgttccacattttgaaagcaaaaaatatatatttgatatacccttcaattgccaaatttgatatgttgcactgaagacagaccctgtcatatatttaatggcttcaagcaggtacttctctgtgcattatagaatagattttaataatcttatagcattgtatattattattgctgttgtcactgttattattattgtggatactggcccttggtgtgttgcatagctccctatgtattctctgtttccatctttaagttcccagaccaatatacattaagagttttgaaaaaaaaaaaaaaaaaaaaa

SEQ ID NO: 81 - DNA, 1077 bp, Homo sapiens
ggcacgagttggtgggcaatagcgcttttctctcaaggggcttttggctatgtgctgcccatcatttcattcatccttgcctggattgagacgtggttcctggatttcaaagtgttacctcaagaagcagaagaagaaaacagactcctgatagttcaggatgcttcagagagggcagcacttatacctggtggtctttctgatggtcagttttattcccctcctgaatccgaagcaggatctgaagaagctgaagaaaaacaggacagtgagaaaccacttttagaactatgagtactacttttgttaaatgtgaaaaaccctcacagaaagtcatcgaggcaaaaagaggcaggcagtggagtctccctgtcgacagtaaagttgaaatggtgacgtccactgctggctttattgaacagctaataaagatttatttattgtaatacctcacagacgttgtaccatatccatgcacatttagttgcctgcctgtggctggtaaggtaatgtcatgattcatcctctcttcagtgagactgagcctgatgtgttaacaaataggtgaagaaagtcttgtgctgtattcctaatcaaaagacttaatatattgaagtaacacttttttagtaagcaagatacctttttatttcaattcacagaatggaatttttttgtttcatgtctcagatttattttgtatttcttttttaacactctacatttcccttgttttttaactcatgcacatgtgctctttgtacagttttaaaaagtgtaataaaatctgacatgtcaatgtggctagttttatttttcttgttttgcattatgtgtatggcctgaagtgttggacttgcaaaaggggaagaaaggaattgcgaatacatgtaaaatgtcaccagacatttgtattatttttatcatgaaatcatgtttttctctgattgttctgaaatgttctaaatactcttattttgaatgccaaaatgacttaaaccattcatatcatgtttcctttgcgttcagccaatttcaattaaaatgaactaaattaaaaaaaaaaaaaaaaaaaaa

SEQ ID NO: 82 - DNA, 832 bp, Homo sapiens
  misc_feature (827)..(829): n equals a,t,g, or c
  misc_feature (831)..(831): n equals a,t,g, or c
gaattcggcacgagtatgaaactaacaacatagaatgccccccaaacaaattcctctaacctcactgagtttacttgccctattactattttttttttttaagatcttctgtctcttgtttttgttttatcccttacctgatgaaagtgaacatttctagtggagaaagaagatcacagttctctaatatgggcattaagagaggggtacagctagaggggaggtgaaaacctgcctccactggggtgaaaaacagtgtgctgaggtttcagccagtgattacactgggtaatcaaccagtcccatgtttcacaaaggagttgtaatgattaacagttcaggtatgcttytgaggaaatctaattgagacctttggaaaatagcattgttatgaatggtgtggtgttacgccctggaggggaaaaggctaggaaaaacattttaacttttcaagtgtatttaaattaacatccaaatgtttcagtgtgctttactggagactgcctgagtttggaattcaaatattgtaaccaaattactccaggtttctgaactaaaatgatctattgatgtttctcaaagtatagatcacagagtaagaaaagaggaaatcaagtctggtttatgacaaacttttttccatgttaacattggacccaaagatgttamtaagagctttttactactgtgagagraccagcgtgatgtgaagacaacgaacattttaagaagtttgactagtagacatttcgtttaagtcttttggagggtcttggttgacaacccacaattttattgtggctccccaggctgggagaacgtggaannncna

SEQ ID NO: 83 - DNA, 1209 bp, Homo sapiens
  misc_feature (1)..(1): n equals a,t,g, or c
  misc_feature (1097)..(1097): n equals a,t,g, or c
  misc_feature (1120)..(1120): n equals a,t,g, or c
  misc_feature (1127)..(1127): n equals a,t,g, or c
  misc_feature (1141)..(1141): n equals a,t,g, or c
  misc_feature (1161)..(1161): n equals a,t,g, or c
  misc_feature (1197)..(1197): n equals a,t,g, or c
nccggtatgtggccccgtctggctagtcccgcctagcgcgcccatttcgagcccaagtttccagctcgggtttccaggctcagaattttccaggagtaggttcttgggcagtggctgtgggagctggaatggcgcagctggaaggttactatttctcggccgccttgagctgtacctttttagtatcctgcctcctcttctccgccttcagccgggcgttgcgagagccctacatggacgagatcttccacctgcctcaggcgcagcgctactgtgagggccatttctccctttcccagtgggatcccatgattactacattacctggcttgtacctggtgtcaattggagtgatcaaacctgccatttggatctttggatggtctgaacatgttgtctgctccattgggatgctcagatttgttaatcttctcttcagtgttggcaacttctatttactatatttgcttttctgcaaggtacaacccagaaacaaggctgcctcaagtatccagagagtcttgtcaacattaacactagcagtatttccaacactttatttttttaacttcctttattatacagaagcaggatctatgttttttactctttttgcgtatttgatgtgtctttatggaaatcataaaacttcagccttccttggattttgtggcttcatgtttcggcaaacaaatatcatctgggctgtcttctgtgcaggaaatgtcattgcacaaaagttaacggaggcttggaaaactgagctacaaaagaaggaagacagacttccacctattaaaggaccatttgcagaattcagaaaaattcttcagtttcttttggcttattccatgtcctttaaaaacttgagtatgcttttgcttctgacttggccctacatccttctgggatttctgttttgtgcttttgtagtagttaatggtggaattgttattggcgatcggagtagtcatgaagcctgtcttcattttcctcaactattctactttttttcatttactctctttttttcctttcctcatctcctgtctcctagcaaaattaagacttttcctttccttagtttgggaaacgtngaattctgttttttggtggttancttagtnctctgtggtttttnagtttgggaaattccaattnatggctcaagaaatacttgcttagcagaccaatagnccattataattt

SEQ ID NO: 84 - DNA, 1669 bp, Homo sapiens
  misc_feature (587)..(587): n equals a,t,g, or c
  misc_feature (1634)..(1634): n equals a,t,g, or c
  misc_feature (1648)..(1648): n equals a,t,g, or c
  misc_feature (1659)..(1659): n equals a,t,g, or c
  misc_feature (1668)..(1668): n equals a,t,g, or c
aggcgcttaggggctgaggcgcgatggcaggtgtcggggctgggcctctgcgggcgatggggcggcaggccctgctgcttctcgcgctgtgcgccacaggcgcccaggggctctacttccacatcggcgagaccgagaagcgctgtttcatcgaggaaatccccgacgagaccatggtcatcggtcaggcgggctgagggtggggaggccctttgtacccagctcagccctcggcggcgctccctcctcccgagcccagccgggtcgctggctcccccagtacctagcctgagggtgccccgaggacgccaggccccctgcctagagctccgggccgcacgtcggagggggccgggcggagaggcggcccactagggccggtcgtgactatgtgtctgccccgcaggcaactatcgtacccagatgtgggataagcagaaggaggtcttcctgccctcgacccctggcctgggcatgcacgtggaagtgaaggaccccgacggcaaggtggtgctgtcccggcagtacggctcggagggccgcttcacgttcacctcccacacgcccggtgaccatcaaatctgtcngcactccaattctaccaggatggctctcttcgctggtggcaaactgcgkgtgcatctcgacatccaggttggggagcatgccaacaactaccctgagattgctgcaaaagataagctgacggagctacagctccgcgcccgccagttgcttgatcaggtggaacagattcagaaggagcaggattaccaaagggcaagtgcatatctccttgtaatttgagagggcagttgacctttatacccactatacctactcaagtttctgcttgggagatcagctctgcagagaatggaatgagaagtattggtttagataggttgtttgtttgttgtttttgagacggagtttcactcttgttgcccatgctggagtgcaatgccatgatcttggctcactgcaacctccgcctccccaggctgaggcaggagaatggcgtgagctcgggaggtggagcttgcagtgagctgagatcgtgccactgcactccagcctgggcgacagagtgagactccttctaaaaaacaaaaacaaaaccaaaacagtagttagggtacacacacacaaattctagtgattttccccccagtactacccttgacttttgaaattcctgctttctcagagtttacaacatccttaccaaacagccttctccctccttaccacaaaaaaaraaaaaaaagttctggggttgaggggacactccattcttaacatcctctattatcccagcccaattccccagctctcactgggactagttgtacctatcttcattcatttggtcccagcatgactacctgttggtgcatgagctgatctctcctaacctaacagccagatgctagtctctggtactyagatgctgggctgcatcagataggatgcacaggatcatcctgggaagcttgttgacatagattcctgtgcaacacttcagatatagtcttaatgtagatttgtgttggggtggtatggtaggtagaataatgggcctaccactgtgtaaacatatggatatgtttacctaacatgacagaagaganttaagttgctaatnagatgactgtnaaataaatna

SEQ ID NO: 85 - DNA, 1336 bp, Homo sapiens
ccacgcgtccggagttccacaaaatttgttagtcatcaaataatagagtttttcttaagtgaccacttacatactcatctacaataaaccccaactaactaatttttcactttgtgtacctcatgctaatatccgtggacagtaatgtgcctgttgtgttccttttgcttttcatccttgtgatcttatgtcacatggaatgtaaaggccacatatatatatgtgtgtgtgtgtgtgtgtatatgtatatttttaagaatatttagtctggatttcatgaaattgacttctgaaataatttgcctcaattttgtttcctggtggtttgagaagaaagttcctgtggtgaaatgaaaaggggataaagggaagtacttattttaaaacataagtaacttgtggattgttgaatactggaaaaagagtgttacttccccgttaacctacgcctcgtgtaatccttcaggttggaagtcggatcgcagaccgtgtatatgacatacccagaaatttcccccttgctttggatcttggttgtggaagaggttacattgcacaatatttgaataagcttcagttattccattgcaggaaactattggaaagtttttccaagctgacattgcagaaaatgctttgtttgcattgggtgaatgaccttcctagagcacttgagcagattcattatattttaaaaccagatggagtgtttatcggtgcaatgtttggaggcgacacactctatgaacttcggtgttccttacagttagcggaaacggaaagggaaggaggattttctccacacatttctcctttcactgctgtcaatgacctgggacatctgcttgggagagctggctttaatactctgactgtggacactgatgaaattcaagttaactatcctggaatgtttgaattgatggaagatttacaagaacaaaagtccagaatgttgacctaattttacaaaacaagctgcatatcagctgatgaatgcatgagaaattttcaaggctttcacagtggtcttaaggtatgggtgagagtaactgtgcttggaatagaaaagccctgctgcatcgagacacaatgctggcagctgcggcagtgtacagagaaatgtacagaaatgaagatggttcagtacctgctacataccagatctattacatgataggatggaaatatcatgagtcacaggcaagaccagctgaaagaggttccgcaactgtgtcatttggagagctaggaaaaataaacaaccttatgccaccggggaaaaaatcacaataaatatttattcagtgttaaaaaaaaaaaaaaaaaaaaaaaa

SEQ ID NO: 86 - DNA, 799 bp, Homo sapiens
ggagacggtgggtgaccagagagtcctgtctatcctaggaggagaacattcagcccaaatcccagccccatcatgcacagatcagagccatttctgaaaatgtcgctgctgattctgcttttcctgggattggcagaagcctgtactcctcgtgaagtcaacttgctgaaagggatcataggtctcatgagcagactgtcaccggatgagatcctaggcttgctgagcctccaagtactgcatgaagaaacaagtggctgcaaggaggaagttaaacccttctcaggcaccaccccatccaggaaaccactccccaagaggaagaacacgtggaacttcctgaaatgcgcctacatggtgatgacctacctcttcgtatcctacaacaaaggggactggttcactttttcctcccaagtgttactgccactactgtaacttggaactggacatcagggatgatccctgctgttctttctagtgagcctgctccatctcagcttagccttcacaaggcctccatctcccaggcattctaacctctgaagaaagctctctgtcccctggactgcctgtgtggagggtaatgaactgggtcctttaaggaatggcacctgggtgcccagaggcatggccagaaggtgtctgtgggggccatgccttagggggatgcacccagggcggctgagagagcaactgcaggagtttcccctaaaatctctcctccagatcgttctcgaactttccccactacttccataataaaatgtatacttgttgaaaaaaaaaaaaaaaaaaa

SEQ ID NO: 87 - DNA, 1345 bp, Homo sapiens
tctacctcttgtcctccccccaacaccaccaccaccctggctcccctccctcatgaccgcctggatcctcctgcctgtcagcctgtcagcgttctccatcactggcatatggactgtgtatgccatggctgtgatgaaccaccatgtatgccctgtggagaactggtcctacaacgagtcctgccctcctgaccctgctgagcaagggggtcccaagacctgctgcaccctggacgatgtccccctcatcagtggccctgatctgcctcctgcgctacgggcagctcctggagcagagtcggcactcttgggttaacaccacggcactcatcacaggctgcaccaacgctgcgggcctcttggtggttggcaactttcaggtggatcatgccaggtctctgcactacgttggagctggcgtggccttccctgcggggctgctctttgtttgcctgcactgtgctctctcctaccaaggggccaccgccccgctggacctggctgtggcctatctgcgaagtgtgctggctgtcatcgcctttatcaccctggtcctcagtggagtcttctttgtccatgagagttctcagctgcaacatggggcagccctgtgtgagtgggtgtgtgtcatcgatatcctcattttctatggcaccttcagctacgagtttggggcagtctcctcagacacactggtggctgcactgcagcctacccctggccgggcctgcaagtcctccgggagcagcagcacctccacccacctcaactgtgcccccgagagcatcgctatgatctaaggtctggggagggtggctggcccggcctccacagcaccccaccccatatcttctttccatttattttgtaccaaaaacaattttgagaaagtattctgttgggatctgggcttcctcacttctggagaagtggccatcccatgcccacctgtgccatggaggagtgggccctgccagctgccacagctgcatgacctgcttccccaccccacggtgtcgttttgtttttaaaggtcacctgtcctcactcacccagccagcccttcaggtgccttctactcccagtgccaaagccagaccactggggtttcctgctgcaggaattgggggctgggaacagcagaggggatagaagtctggtggaggtggagtgggcacgccttagctacggaaaggcccatttctgggcccactgagctgcactgggattcttcactctgcccctcacttcctttagggcaaataacacagcagaaccacgtgggtattttagtacttttttttatattaaaagaattctaatttgcaaaaaaaaaaaaaaaaaa

SEQ ID NO: 88 - DNA, 1347 bp, Homo sapiens
  misc_feature (83)..(83): n equals a,t,g, or c
  misc_feature (334)..(334): n equals a,t,g, or c
gggcagccctcaggccctccggcagcctggccgggcccgagtggccatggcagcactggtgtggctgctggcgggagcacatngtcaagcctcaacaagtggatcttcacagtgcacggctttgggcggcccctgctgctgtcggccctgcacatgctggtggcagccctggcatgccaccggggggcacggcgccccatgccaggcggcactcgctgccgagtcctactgctcagtctcacctttggcacgtccatggcctgcggcaacgtgggcctaaggctgtgcccctggacctggcacaactggttactaccaccacacctctgttcancctggccctgtcggcgctgctgctgggccgccgccaccacccacttcagttggccgccatgggtccgctctgcctgggggccgcctgcagcctggctggagagttccggacaccccctaccggctgtggcttcctgctcgcagccacctgcctccgcggactcaagtcggttcagcaaagtgccctgctgcaggaggagaggctggacgcggtgaccctgctttacgccacctcgctgcccagcttctgcctgctggcgggtgcagccctggtgctggaggctggcgttgccccaccgcccactgctggcgactctcgcctctgggcctgcatcctgctcagctgcctcctgtctgttctctataacctggccagcttctccctgctggccctcacctctgccctcaccgtccacgtcctgggcaacctcaccgtggtgggcaacctcatcctgtcccggctgttgtttggcagccgcctcagtgccctcagctacgtgggcatcgcactcactctttcaggaatgttcctttaccacaactgcgarttcgtggcctcctgggctgcccgtcgggggctgtggcggagggaccagcccagcaagggtctttgagacctgggggatctcaggagccacctgggatggccctggcctgaatccagcctccgctgtggccatagaaggaatggagaacagggctgggcatggtsgctcacgcctataatcccagcacttccagagtccgaggtgggtggatcacctgaggccaggagttcgagaccagcctggctagcatggcaaaacctcatctctactaaaaatagaaaaattagctgggcatggtggcgcgtgcctatagtcccagctacatgggaggctgaggtgggaggatcacttgagccctggagatcgaggctgcagtaagccaagatcgcatgctactgcactccagcctgggagacagagcgagacgctgtctcaattaaaaaaaaaaaaaaaaaccggcacgtag

SEQ ID NO: 89 - DNA, 642 bp, Homo sapiens
  misc_feature (41)..(41): n equals a,t,g, or c
  misc_feature (49)..(49): n equals a,t,g, or c
  misc_feature (64)..(64): n equals a,t,g, or c
  misc_feature (607)..(607): n equals a,t,g, or c
  misc_feature (621)..(621): n equals a,t,g, or c
taaaggggaaacaaaaaggctgggaaggcttccaaccgcgntttgcggnccggcttctaggaantagtggaatcccccgggctggcaggaattcggcacgagaaaatgacttcagacaaatatgatcaatctctacagtcccctgatgaatttcacaggttcccaccaccatcagttctacctattcatctcatccatgctcattgttctgcctctttcctgttcctatggatgccctggcatgtttgtttctttctttctggcctcctatttccctcccctcagacatcacttcagcatctgtgccttctcacttcccttatcctgggtgttaccatttcagcctatgagcatgccattaatttgccatctttacaaaattctctcttgacttcacatccctctgtagctgccctctcccttctctcctcttctttacaacaaaactccttaaaagaactgttggctgggcacagtggttcactcctataatcccagcactttcagaagccaaggtgggaacatcacttgaggccaagaggtcgagaccagcccaggcaacacagtgagacctcatcactacaaaaaaaaaaaaaaaaaactcgangggggggccggtanccaattggcctaaagtgagtc

SEQ ID NO: 90 - DNA, 802 bp, Homo sapiens
  misc_feature (105)..(105): n equals a,t,g, or c
  misc_feature (730)..(730): n equals a,t,g, or c
  misc_feature (755)..(755): n equals a,t,g, or c
  misc_feature (757)..(757): n equals a,t,g, or c
  misc_feature (777)..(777): n equals a,t,g, or c
cgtgcctgtagtaagctcatccctgcctttgagatggtgatgcgtgccaaggacaatgtttaccacctggactgctttgcatgtcagctttgtaatcagagattntgtgttggagacaaatttttcctaaagaataacwtgaycctttgccaracggactacgaggaaggtttaatgaaagaaggttatgcaccccmggttcgctgatctatcaacatcaccccattaagaatacaaagcactacattcttttatcttttttgctccacatgtacataagaattgacacaggaacctactgaatagcgtagatataggaaggcaggatggttatatggaataaaaggcggactgcatctgtatgtagtgaaattgccccagttcagagttgaatgtttattattaaagaaaaaagtaatgtacatatggctggatttttttgcttgctattcgtttttgtgtcacttggcatgagatgtttattttggactattgtatataatgtattgtaatatttgaagcacaaatgtaatacagttttattgtgttaccatttgtgttccatttgctyctttgtattgttgcatttagtacaatcagtgtttaaacttactgtatatttatgctttctgtatttaccagctattttaaatgagctgtaactttctagtaaagaattgaaaagcaaatcctcactaaaggatacacaggataggataaagccaagtcncatcaacattaaaaaatactaaaananaaaacacaaaaaaaaaaaancccggggggggcccggaacccattc

SEQ ID NO: 91 - DNA, 470 bp, Homo sapiens
ggcacgagggaaatcttgcacataggcaggtaaataattataaatggtgaagtggattattctgagctgcttaattttaaagggaaagagaactttaaactcttcaaccttttatgctgctaataagagttccacaatcaatagaaatctatcttggcaggcacttccttttacccactagaattttttcccttgggagttcacgatccccagaaactgtgatatgagccattcaatattgatgtactaaaacagtgctctgcttaaatacagtttttcaacatacagtcttggaagaaacaaaatccaaaataaattccaatagtccagtaacaggaataaagacaactattgcaaattaaatcttacagacttatatgaaagctgttgttaacagctgggtactagttatttgaaaagtttctcgtgccgaattcgatatcaagcttatcgataccgtcgacctcgta

SEQ ID NO: 92 - DNA, 1881 bp, Homo sapiens
  misc_feature (70)..(70): n equals a,t,g, or c
  misc_feature (126)..(126): n equals a,t,g, or c
  misc_feature (1860)..(1860): n equals a,t,g, or c
atttttccttttccttaacaatacctttggccatttttttccagttcactatgtttgtatactaactttncttcagccttttaatgcgaagcaactagtagagcatgctttcaggatctgacagcnctgctagtagagcgaagtatttattaatacagaattaaccttmgcccctttaaagtcaagtctgtctaatctaactagcgcctcgctttgccttctcacaatgctcactagccatcatgctcacccttctcttccagatccacttcctcatgatactgtcttctaactgggcttacttaaaggatgcgagcaaaatgcaggcttaccaggatatcaaagcaaaggaagaacaggaactgcaagatatccagtctcggtcaaaagaacaactcaattcttacacataaatgtttgccagagtgtttcggccgacgtatttacagctctgacaaatcatcagacagctgctctgcagtacagatgtgtatcccaccaaactaatgtagatgtacaaacacttcactgtctgtctcaagctgctgggatgtatctctaggaaaaccttccagtgggtaaatctttttctttagaacaaatattggaggtttcatgttagccattttaaaaggcaacactttgacaaaatgatcgttcatactttgggaatttgtggcatgttcacatttattgctagggcaattctaccaagacactcaatggaatatgtcacactccttaatagggacctgtgactccttaataaggacctgtgacatgcccagcatcaagggataagaccgtaaattcacatatatgccatctgtcctcaagtgttatctacataggaaataaaatggaattgatgtaaagttccatttctgacagctgacatttattaaactttggatcaaagataatgtgattcttatgattgatttctcaaactagcttttccctcccaagtccaggacccattaatttcctgagccaatcagaaatatatttttcaataatgctaaaattagctacaattctgctgaccctactattaaagaatctggatgctggactcactgacaagctttccagaagcaattttataacagatttcattttaacaaaatactgatccaattttcattattcttgagaaatgtcagctttgccttaatgagtatttgctttaaatttctaagaatttatatcataactagagacccaaatatctttcacagaattttgttccataaatgtttttcttaattattaagaagtgttaccttattaaaatgaccaccattctaaaccatttttcagtggtctggatacgaagtttacagtttcataccaactatctaaaacctaattgcaaattgaccacagacctctaacctcctacttttatagacttgaatacttaagtaatttaaattagggttggtatttcatttttttcttatctaaatcttagtttcctggaataataaagtttgatgttcagcaagagaactgcttgagtttaagccattttcaaaagaaacttgccttttacattattgtgttccagaacattaagtgactgtaggtactgggtattagtgatggtaaactttgtgttgctctttatgaaatgatccatataactgttgggtgcatcagtgcttttcaaaggggctgcttactatagggttaactatgtatattcattgttaagagttaacttgtggtttggctgttycctggattttataacatacatgtgcagaaatgtattcaaatgaaaggaagcatacctttatcaagatgctattaaaattgaacatcaagtataaaaaaaaaaaaaaaaaaaaattnctgcggccgacaagggaattc

SEQ ID NO: 93 - DNA, 1450 bp, Homo sapiens
ccacgcgtccggcccatatcacttaaaaagttcaaagccaaacaatgtttaacctctccttttttacattgtatggactttgtatgctgaagcttcattcagcctcctcctggttcacattgttattgttaatatcattatttttgtctgtcgtttattgtcagtctacaaattagatattattattgtttttgttttatacaggcaacatttatctggatttgcatagatgtttaccattttctttactcagtgttttatcaaatacatcctttaggaattcctttaatttggtctcttgttggcatatgttcagttttcatttgtctattaaatgtttatcacttttttcgtgataggttgttctgctgggttcacaattttaggttgccagttctgtttttttgtttgtttgtttgtttgacacttggaagatattattctagtgtcttcaatattctgtctttggtctttggtcattctaattaccttttctttgtatatgatctgtcccttctccatggcttcttttaaaatcttctctttatctttggtgtttttcagttaaatatgtaatagaactaggcactgatttgtttatatttatcctgctcgagacacatgatgtttcatgtatctgtggctttttatagtttaaaataatttctggaaaagtcatagtcattatctctttaaccgctccctctcttccattctctttgttctctcttcctcgaactcctgttagtcatttgatcctccatatctctgaatatttttgtatttcttttattatttatttcttgtctctgctacattttacattgagtaaaagtgggatgtgacagtgggaaatcattagtgacttagaaattccagttggtcattgggccaattttgatgctaccttctctcttttatttctcactttaaaataaaatttgcaaaaacaaaaaattaaatatagtatgagtccagttactggcctaaggagctaaaagcattctgggtttgtatgaagacagctgagttataacaaatgagagtactgttgtgtgactgcattaattattccctttttaaatgtacaagagcaaggcattctacctgactgtgttattgagctctgcagcatacatgtgacagagctaaaacaaacaagcaaacaaaagaaaccacagctttaggatactctgttcatgaatatagcctgaaaatgataatcaagaagtaaacttttaccagtattaaggaacattaagctgcctatctctcagtgaatttcagaatgatattttaaaagttagtttaggctgggcactgtagctcatgcctataatcccagcactttgagaggcagaggccaaggcaggaggatcacttgagccccggattttgagaccagcctgggcaacatagcaagacactgtctctaaaaaaaaaaaaaaaa

SEQ ID NO: 94 - DNA, 541 bp, Homo sapiens
tgcaggtaaccgttccggaattcccgggttcgacccaaggggtcccgtgatgccttgtcatggtcttcttgcacagggcctcagcctggcacctctgccaccgtgggctctctgttgtgtgggggtgtcccgtgcattgcaggacatccagcagcatccccggcctcctgctccgtgccagtagcgccgcaccccgccgtcgtgacagcccaggtctcccggtgtgcagaatgcccgctggtcatgctgagaggtacaggggtgctgcccccagggtttgaacgctgtctaactcccacctctggtgtgtctctcccctgtgtgtagcgtggagtcactggatgagtgtggtgacctccctgtgtccagctgccctgggctgcaagcaggtccctcctgcagccctccaggccacccttaagcagagctggaccagcctggccaacatggtgaaaccccatctctactaaaaatacaaaaattagccaagcgtggtggaactctgtctcaaaaaaaaaaaaaaaaaaaaaaaagggcggcc

SEQ ID NO: 95 - DNA, 795 bp, Homo sapiens
  misc_feature (791)..(791): n equals a,t,g, or c
ggcacagtgcagcatctacctaatccaggtgatctttggtgctgtggacctgcctgccaagcttgtgggcttccttgtcatcaactccctgggtcgccggcctgcccagatggctgcactgctgctggcaggcatctgcatcctgctcaatggggtgataccccaggaccagtccattgtccgaacctctcttgctgtgctggggaagggttgtctggctgcctccttcaactgcatcttcctgtatactgggaactgtatcccacaatgatccggcagacaggcatgggaatgggcagcaccatggcccgagtgggcagcatcgtgagcccactggtgagcatgactgccgagctctacccctccatgcctctcttcatctacggtgctgttcctgtggccgccagcgctgtcactgtcctcctgccagagaccctgggccagccactgccagacacggtgcaggacctggagagcaggaaagggaaacagacgcgacagcaacaagagcaccagaagtatatggtcccactgcaggcctcagcacaagagaagaatggactctgaggactgagaaggggccttacagaaccctaaagggagggaaggtcctacaggtctccggccacccacacaaggaggaggaagaggaaatggtgacccaagtgtgggggttgtggttcaggaaagcatcttcccaggggtccacctccctttataaaccccaccagaaccacatcattaaaaggtttgactgcgmaaaaaaaaaaaaaaaaaaaaaactcgagggngggc

SEQ ID NO: 96 - DNA, 762 bp, Homo sapiens
ggcacgagtgcctctacgtcatgtcttctccaatgtcatgattcacgtcgtgcagtactgttttggacttgtctattatgtccttgttggcctaactgtgctgagccaagtgccaatggatggcaggaatgcctacataacagggaaaaatctattgatgcaagcacggtggttccatattcttgggatgatgatgttcatctggtcatctgcccatcagtataagtgcccatgttattcgcggcaatctcaggaaaaataaagcaggagtggtcattcactgtaaccacaggatcccatttggagactggtttgaatatgtttcttcccctaactacttagcagagctgatgatctacgtttccatggccgtcacctttgggttccacaacttaacttggtggctagtggtgacaaatgtcttctttaatcaggccctgtctgcctttctcagccaccaattctacaaaagcaaatttgtctcttacccgaagcataggaaagctttcctaccatttttgttttaagttaacctcagtcatgaagaatgcaaaccaggtgatggtttcaatgcctaaggacagtgaagtctggagcccaaagtacagtttcagcaaagctgtttgaaactctccattccatttctataccccacaagttttcactgaatgagcatggcagtgccactcaagaaaatgaatctccaaagtatcttcaaagaataaatactaatggcagaaaaaaaaaaaaaaaaaaaaaaaa

SEQ ID NO: 97 - DNA, 1103 bp, Homo sapiens
gtcttaatgagcaacagcaacagcagtctccagttaagaaagagagaattaaatacagcagagatttcctgttgaagctctcaagtgtttccatctgcagaaaaaaaccagactttctgcctgatcatcccattgtactgcaaaaaccagaaaacaaccaaagttttaagtagcattttaagaacagatgaatttaagtttggacatctgcaaatgaggtggatctagcaacaataactgtaatggactgtgacaattcaatttattcttaattttgatggttggctatttgacttctctaaaaatgagaaagagctattttaaaatataaagaattttctaatcagtttcagctttgcaggaggtttcctgcataaattgggaagtaacactggaaagtaggaatttggttagtgaagtgggaagactgtatatttataatttgcatactacttgcaattttttgtttttcatcacttgtaataatggaatggaaatgtaagctgtaaagactctcaaatataaaatatttgctacagtgtatatatggtacataattgcttgttgcttttaaagttccttctgttgttctgcttcccactgatttcataccagctcatgaatggatcattacagtctctccagaggcttagaatgattcagaatgttcaatgcatagttctcaataaacaggaggcagaatttttaatgggtatttcttttcagatatatgattggtctctaggtttttgataataatatggtcttaaattcataattactagcagagattgataatttggaaacaatggtagtgaatgaaactgaagttgaaaaacggctgctacttatgtcactaatcagaccatatgaatagcagaagttgagcaatttcaaagtaaaactgatatttttatttccaaaggaatttagacatttgaaaataattgacatacattaagttttaattcgataatttcttatatatggatgaacaatttttgggtttaagcttttaattcctagaaattttatacattaaatctcctgcaatttgtcactctggatgttactgtttaaaaaaaaaaaaaaaaaactcgtag

SEQ ID NO: 98 - DNA, 1633 bp, Homo sapiens
ggcacgagcatcagtaagtaggagctagggaagagaaagcatgcaaaagggcaagaatcaggagaattgatatagtagctggacagaactctagatgtgtgtgtgtgagagaaagagaggcagggagaaggagggaggagttacccccacgatgacctccaacttccctttctgcaccctcatcctggggatagcacaggctcaggcctgccctggttgccctggcgattggcctggcctgggctcaggggtgggggaggggctgcaccacattaggacctgccgtactccaatcccatgcagtcctcctgctcctgctgctgcgtgcctgggctctggtcatgccaggcttccttgtgtcctgcgtctgtggccggttcctgccaacctgtctagtcctttcaggcttgaggccctgcattgctctttctggtcctctcccctccttcccgctccccatctagccttttttgggttccgggatctgctgacagactttcttcttgctgcctgcctgcttacatttcagaagacccctctggaactgcccatggctgtggtccacctgctggtagcaacgccctgttaccaaatgctagataatctgccactcccctctgcagccgccaactggtgctgagctgccacctgttgtctgtttccacacccttgtacactgcattctgcctgtcactctggacagctgcccagcagctgcagctgaggccgtcctgccagcacctaccgcagccccatgggtggtcctgtccagttcctggcgctcccagcctgcctcatctgctgtacttacagagccacatctggttgaatacagagctggggtagcctggatgggcccatggcacactcactcccagagaggcgggcatcctctctctggacctctagggaagggcagggtctggagcccaataataaaacacagtaatgataatcatagctaatgtttactgagaacttaggatgtgataggctcaatgatttaccagaattactctatactgcataactaccctatcaggtaagtactattaatatcccctttcccacatgaagaaactaaggctaaccaatagaaatgaacctgtgtaatgtcccatgggcataattcatggagccaggattcagaaccaggtgctttacttcagggctgaagctcataaccactagaccaaagcgcctcctccgtgacctctggggaaggcccagcaacatcctctattgcgtccaatgacttctccctggtctgagatccactgactcacaggggtagggttaaggttaaggccagagtctcagctaagctttggatactttcttctggatttggagaaggctggaataactgaatttctgctcatcttcaggagcggcctactagagccacacatttcccagctctccttgtgtgtttcccagacccttcttccatcgtgtcctctcccttaggctcctggaaagttttcagagagaatcacccagtggtaacattgttaaacaaaacaggaaaatgggacttgtgtgtatatatgattaaattattaattgatggatctaccttcttagctcgtgccgaattcgatatcaagcttatcgataccgtcgacctcga

SEQ ID NO: 99 - DNA, 1873 bp, Homo sapiens
ggcacgagctcaggctcccgtcggacttcacttggccacatccttcactactctccttccttatgctttatttaacacatttccacgagacatgtgttcccatgaccttcttccatgtccacctccacagttttgctcaggttctcgttccctctcccaggcctctctccactctatactttcaggaattctacccatgcaaagcccatctcagcttccacctcactcctgacttgacacctcctcatgcagcctgcctgcctggcgccttgtctagatgctctcacctcgttctgccttggattactaaaacttactttctgtcttgctttctttccttctggagttcttgagggggagtgcagcttctttacaatgtctagatccctgtcccatccacgcacactgcacagatacactacagagcgcccagctcacagcagacactaaatggtgaaagaatgcaagagggtcctgtgtctccctaagtccaaaaggagacataagaatattacaggccgatatttgtaacccattaagaaaaaaggtgaaatagtgtcaatacctaagcaaaataccatgagaatataaatcaaagtgtgaacaggagtaatattaagacagaaaggcaatggttctcttctggaaccattagcatttaaatacagaaaagaaaatgcaccattttaacagctgcagaagataataacagacacaattatttttccctaactagatgccatgccccatgtacagtagttcctaatcatcccctcatcttagtctcataacaaccctattattgtctctatgttacgtaggaggaaactgaggtaccgagcagttaattaaccttttccatcatgcaaccagcaaggcagagctaggatttgtatcccagtagcaccttttccagattcaagctcaactcctaaattctcctgcgtcttcactgtattgtttttacaacacatttgcaggttgtgggctaagtcaccggctactgagagataaagaagtaacactcctatgaattttacatttctggctgggcaccgcagctcacacctgtaatcccagcactttaggaagctgaggcaggagaattgtgtgagcccagaagtttgagaccagcctgggcaatatagccagaccccatctcaaaaacaattgtgcatttctaatactcactgagcccctgctatcccctggctcagtgtacattgctctatatctcctagcaaacccaggagctatgtatgaactgaaaccctggttaaatagcttggtcaaagtcacacagctcaggtgggggaggctgggtttaaaggcaggctgctgatgctatgatccatacttgaggctactgctggccacaggctccatctgaggccctgtagggggtgagaggagaaacccggccccagagacagggtctgaaccctctgctgccagccagtagagaaaacagtccctcacccacaacgtggggataacactgcctaccacaccaggcagtggaaagaattaaattaatttaaataaaggagacagtgcagagtacctgacacgcaataagcactcaatgagagctattattagaggtaactctccctgctttcagtctaatgccatgtttcttatcacttaaggtgatcaccttgttgctctttaaaatattatgtatggttttctctaagatacatgtaagtgtaaaatgcagaagaaaagcatgcggggacggggggggggaagaaattcccttttctttattgatcagcctttcccccaaaatactttctcaaggaattattaaatactcaacatggcgcctcgtgccgaattcgatatcaagcttatcgataccgtcgac

SEQ ID NO: 100 - DNA, 1384 bp, Homo sapiens
ggcacgagcagttattttcaaaatggctatggaaaacacgtaagttttaaaatatgccctctttctcgttttaaaaaattattactattgtccatacatgttactcttttcatctagatttatcatgtttctttggcctccagtctctggtgtttgcctaagctttattagagacaggtcatttctacctatgtgtcattttatctatgtcttgatcttatgtaattcaattgctctttaagattatgttctcttctcatgtttggtttatccattatccaaattttccatttctttaacctgttatcccttgactctttacagttctacctttttattcacttagtcttttaccctttttttattcgttcacccctttttgttgtttcaggtactccttacttatctccttagccttttcttcttcatcttctttcttacttttctcctacttctcattttacataatacttactttttgcttcagtcttcaaccattgtcaatcttgtttttccttatattccattttactttctgaactactctttaatctcctgttcaacactacctttccttcttttttatcccctcttatttacacggtgattacaacagtttggtatagtctgatttatctgattgtaaaattgatgagttggatgtaccaaaaatataaggaagctaaattcaaagaaggtaaaagatttgcttgtgtcacctagctggttaattttggcatatgcattgtttctctacatagtctatgtagtcaaacaggtttcatttagaaatcattccccataagaagggtttcaatttgatttgaacaggcagagatggaaaaaatttcctctctgataactactgctactgttgtataccagtagaaatataacagcagcacttaggttagaagaagctcattagctattcagaataaatttcatttttcttaatttttggtaatcatatctcagcctgttgaatttaacttaaactctgaaagaattttggttgccatttaatttttaggtttccttaatgatagggacctaataatttgttttaaaaaatttgtcttggctgggagcagtggctcatgcctgtaatcccagcactttaggaagccaacattggaggattgcatgagcccaggatttcgagaccagcctgggcaacacagtgaaacctcatctctacaaaaagttaaaaaattaaccaactgtggtgccacatgcctgtagtcccagctgcttgggaggatgaggtgagaggatttcttgagtccaggagtttgaggctgcagtgagctatgatcacactcctgctcttcagcctaggtgacacagcaggacactatctttgaaaaaaaaaaaaaaaaaa

SEQ ID NO: 101 - DNA, 945 bp, Homo sapiens
  misc_feature (295)..(295): n equals a,t,g, or c
  misc_feature (875)..(875): n equals a,t,g, or c
  misc_feature (914)..(914): n equals a,t,g, or c
gaatggtgaaatattaagtgctttctcccccaggttcaggattatgacagctatgtccattcacctcttctgtacagcattgtcctgtggaagttctggccagtgcaataaggcaattaaaagaaataaaatatcaaacgattggaaagatgttaatgtgtcatcattcatagaaaacatgattcatagatatacatacacgaatgctttgaattcataagtagattcagccagttgctggatataaagtcaatatacaaaaactatttttatagacatgaaacacgcaatgagnaaaaaaatttaaccatttttagtagcatcaaaaaacccccatacctaggaatatgaatttgtagtactatttgggatatgttgatggatatttatcatttccagtttgggattattataaagaaaatagccctgaacatttgtaatatatgacttttggtgaatgtagcattcatttctgttgattacaaactcaggggtgaaattgttgagtcctaagggagctatagatgtattcaacttcagctgatatggctaaataaatttgcgaaaaagattgcatcaagttatgctcccatcagcaatatgagagttcctgtttttccacattgtcagcaacactttgtactgttactccttttaattttagccgatttggctgaaggtgtggtaatatctcattgtagtggccaggcgtggtgctcacgcctgtaatcccagcactgtgggaagccaaggtgggccgatcacgaggtcaggagatccagaccatcctggctaacatgatgaaaccctgttgcctgtagtcccaactacttgggaggctgaggcaggagaatggcatgaactcgggaggcggngcttgcagtgagcctccagcctgggcaacagagtgagantctctcaaaaaaaaaaaaaaaaaaactcgag

SEQ ID NO: 102 - DNA, 1437 bp, Homo sapiens
cgcccgacgccggaactgcgagctctcagcgggagccgagacggtgcagggccggagaagcaccttcactcccagcctgcgccccgatgctgcgcgttctgtgcctcctgcgcccctggaggccccttcgggcccgcggctgcgcttccgacggggcggccgggggctcagagatccaagtgcgcgccctggcgggtccggaccaagggatcactgagattctgatgaacagaccttctgcccgcaatgccttggggaatgtcttcgtcagtgagctgctggaaactctggcccagctgcgggaggaccggcaagtgcgtgtcctgctcttcagaagtggagtgaagggcgtgttctgtgcaggtgcagacctgaaggagcgggaacagatgagtgaagcagaggtgggggtgtttgtccagcgactccggggcctgatgaatgacatcgcagccttccctgcacccaccattgcggctatggatgggtttgccttgggcggaggcctagagcttgccctggcctgtgacctccgagtggcagcttcctcggcagtcatgggactgattgagaccacgcgagggctcctcccgggggcaggagggactcaraggctgccccgttgtctgggggtggccctggcgaaggagctcatcttcacgggccgacgactgagtggaactgaggcccacgtactggggctggtgaatcacgctgtggcccagaacgaggagggggacgccgcctaccagcgggcacgagcactggcccaggagatcctgccccaggcccccattgccgtgcggctgggcaaagtagccattgaccgaggaacggaggtggacattgcatctgggatggccattgaagggatgtgctatgcccagaatattccaacccgggaccggctagagggcatggcagccttcagggagaagcggactcccaaatttgttggcaaatgacccccattttaaccttcagcatgggagatgcatgccctgaagagcaggatccagaaggaagatttgtggccagattgccttcatcatttcacctctccagacttccatttcttcacaaggatgatgatggaaataaaatgactggcgtgatgcctggaaccaaggtgctgatcctaccacctactgctaccttccttagcttcaccctggctagaaataatcacgagggttgggtttgctttggaaaatgcctgtctctctacttgaatgataaagaattaaattagatctctctgagtcttggtatcattggctctcagcccctgacctctctcagttatcaggcactcattagagatgtcagaagattttaagatacccctagtttcttcctgtggaacaacagaggtaataaataaactctggacatcggttgaaccagtgtcaggggtcagactgcagatcccagtct

SEQ ID NO: 103 - DNA, 776 bp, Homo sapiens
ggcacgagctgatttctatttttaggagctacttggatttgtatgtattttttctacgtgaaaatatatgtactcttcacttttgttccagtactataattgctcatgcactctttctcccctttgagaacattcagtgaaatacaacttcatcaaagatttgctcaaaggagaagaatcgcatgagtgtgaaaagtagatgctcgtagccagaacagaaaaggttacacatgatcatggcacagaagataggaggtttgacttggtgggccataatgtttattatcctttttgaaataacagggaccagcagcagttttctcaggataaatgctctaccccacttctctatgaacaggtgtggggaggcttactttccattttcatatttatacacctctctacaaaagcaatttttaatgaaggttagtggaattgttaaaaatctgagagggaatgatgactggaggtgttttggggtttttttctgtattcattttttaatgagaaaagttttaaatgtagtacaggttagacccaactactaccttactattataggacgattctatgtttctgttaaagtattcaagtagctttctctgggggaaaaagtaccacttggacacttaaaggaattgggatttttgtctactttggataaggcagttgacttcttaagtaaaagcaatagtgtaaaatgtcattttgtttggaatgttaagtgagcaaataaaaaacatgttgaaattgtaaaaaaaaaaaaaaaaaaaaaa

SEQ ID NO: 104 - DNA, 2895 bp, Homo sapiens
cgacccacgcgtccgctttcttctatttcttgtggatattatggctaataacacagcaagtttagggagtccatggccagaaaacttttgggaggaccttatcatgtccttcactgtatccatggcaatcgggctggtacttggaggatttatttgggctgtgttcatttgtctgtctcgaagaagaagagccagtgctcccatctcacagtggagttcaagcaggagatctaggtcttcttacacccacggcctcaacagaactggattttaccgccacagtggctgtgaacgtcgaagcaacctcagcctggccagtctcaccttccagcgacaagcttccctggaacaagcaaattcctttccaagaaaatcaagtttcagagcttctactttccatccctttctgcaatgtccaccacttcctgtggaaactgagagtcagctggtgactctcccttcttccaatatctctcccaccatcagcacttcccacagtctgagccgtcctgactactggtccagtaacagtcttcgagtgggcctttcaacaccgcccccacctgcctatgagtccatcatcaaggcattcccagattcctgagtagggtggcttttggtttttgtttctttcttgtcttgtcttttattgaaaggaaatcaaaaataggctaaacagaattttgagggcatggcccaaataactcatgagttccaagttgaaacatggttgtgcaagttggacattacaatgtaaaacacattttcttcaaacacgttttcccttttgtttcaaaaaatgtaatattttcccccaagcgttttatatttatgtattttgtattcaatgtgaggcttattaaaaatagtgattctaatgtaagaatcagctaagatgcattatatatattttaattaaaattaaaacttcagatatttgtggattacaatcctcatttacttccaatgtgactaaaaagagaaaaaaaatcactgtgtcactttaaagaaaaatcttctaagggatttggattttactttctttagaatgacaagtgaatcatattgacattttacaatcttagatttttctttttttttcttttgagacagggtcttgatccgtcgcccaggcgggagttgcagtagcatgatcaggactcactgcagcctctatctcccaggctcaagtaatcctcccatcttagtgccccaagtagctgggactacaggggtgcactaccacaccgggttgaattttttttgaattttagtagagatgaagtgtcactatgttaccaaggctggtctcaaactcctaaactcagatgatcctcctgcctcggcctcccaaagtgctggaattagcctggccaatcttggatttttaatggaatatgtgggcacaaaatgacagaacataggacattctaaagttccttgatttgatcattataagaagtgtgggactcaagcacaggaaactgaactcttttggtgtcattggatgtttcatttttgacactaattttttctggacaaactctttatgtgtttttcccaagaatagttatctacttcctggaggcaaaatccttggatttactaacatgatgatttaccttttcttcaccgttgtcgttacattgttagaaaagcaacaggaaaaaatccaattcatttgacctaaaaacaagcctcaagtttaaaaccaagctcacgtttttcttaagggaaaaattttctttcttaaacttacatctagcaacttggaaagcactttctctggggatcttcttttgtaactttgcagacaaataagtatgagtcactggggagagagtttgttattgaaatagatgttgcccatgaagaattctccttcctggattgactcttaatcatcaggcatcattcctggtttgcttctctacgaatctcaattccaacttctctgcagagtctgtacagtgattaagccatgccagatggtctttggtgcacacagttatttaagaatccacttccacaggtggctgcccttgtaaggaagaatgcatccctaaatgtggccaccagagagttccagtgggcagatgtctgtggctgcccttctcatttaaggacatgagttcactggagtattactcaaaaagtctgtggtccatttccagtattgtgaatatttagtttatgtggccgtttctttgtttctttgaacagtgggattttcagtgaaaaagtaccctctttttcatttcctattgcagtggtcacagctaatagtgtctgaacatggttcaagaataagagattccatgtagcattttctttattattttcatttcccttatattatccatcattccttaaggacaattattcttaataatgcttatagaaaatgttctctaattaaacatgccaaaaggaaaaagtaagggaaagagggagcaagaagaaaatggaagaaaaagggaaaaaagctaaccggataaccaatttgttataagttggttttcaacaaagaaatttagcagccaagtaaggtttcaagggaatattaacttggtatcagggctacttttttttttttttttttttttacttgcatgtcatccttaatgtctaacatgaaaaatcaccaaagagtatggtttttatcaagaatttgtgttgggagtaaaaactgctttatagctcccaaattaggaagagaagagcagaaatcctctggggcatttaaccatctggcagaattgttgctgcacccttatcccagttataagacagtcaaaatgactatttcctaaatattgtgagtgtatgaaatgtgaaattaaagcaaaaactggagacttttaatgtaaaaaaaaaaaaaaaaaaaaaaaaaaa

SEQ ID NO: 105 - DNA, 2150 bp, Homo sapiens
  misc_feature (874)..(874): n equals a,t,g, or c
  misc_feature (1198)..(1198): n equals a,t,g, or c
  misc_feature (1201)..(1201): n equals a,t,g, or c
  misc_feature (1266)..(1266): n equals a,t,g, or c
ccacgcgtccggacccgagctccagtagttccgcccgctggtcatcgcgccctttcccctgccggtgtcctgctcgccgtccccgccatgctgtctctagactttttggacgatgtgcggcggatgaacaagcggcaggtgagcttgtccgtcctctttttctcctggctcttcttgtcccttcgaggctgctgctgcggggcccggcggaccccagggttctggtgtgagggtctgagctggtctgatacccgggtcattcgctttctttggagactgtggccagaggccgccttgtccgcctcattatttttaaccccgaactgattcagggcctacctggggcggggcgggaagcggtgtcttcacgttccattcctcccactgaggcaggggagcaaatggaaaccgtacgcgcttgaagtgggagttggggtgcttattgttttagtcattttaatgcggcggactcttgatttctccagtcggagcgactccaggtggtttcgggagagacgaggtttagccggtttctggggcgctcaggaaggcgattggaggccccacaaaaaccgttttgctgctttcagctccttgcaaccctttagtagagctgaaccgtagcgggctgcaccgactttgacttggaccactctgggctccgagttggaacagttacactacttgcccttgcgtccgcttagcactaaggcggcagccctcggaatctatggttttacagtccaatatcagtgccacggggatctggaaatgtaggtctcctgattttgtccttacactttactttgatcttctagatcgtatgccaaatagtactgagaatattgttgtaattatttagtccttagaaaangttgttctgttttatcttttgcgcctagtgtgtctgtagagcctagttttgctgcatcggactttttttttgttttaaacagtattttactgttatgattatcctgatgtcaccattaaggattttttttttccttggacttgcattttttgtacttataactgccacttagggaagtagatacacaacctttccttactccccttcaggccttagctagctcagtgtcaattctgtcagtcagaattgagcattctataaaaattgcgcaaacgttactttatgtctttatgacaacacttcaaatttttacttgtatagtgntgnctttttttaatccatatttggatttctagatgccacagatatttctctgaggaaagtatttattntgagtctgatatttattgactctatgctaggtccaatgagagaaatgcaaagatagttaagaaagactcggccttcaaggagcctaaatgtgtagaaaaggactaaggcaaaacaataacttttttgagctcttgccatgtgtgaagcactttatacacctgtaaggtaggtaacgttgttcttattaaacatgaagaaaatgagactttgtgagaagcaatacagtatagaagttaagaatatggactctaaagctagatttcagaggtttgaagtagctctgctacttactggctgtgtgactttgagcagattacttaacctgtctgtgcctatgtttacttttattgttgtaaaaagatatgcaacataaaatattccatttcaaccgtttttacgtgtatacttcactgacattagttgcattcactatgttgtgcaaacgtagggtcgctatgaagattaaatgagttaattcatataaagccctcagaagagtgtctggcacatggtgagtattggctgtactgtggtcgatgtcattgttagagagctttagtgatttgcttaagacagaaggtagactgggtgcgggtggctcacgcctgtaatcccagcactttgggaggctgaggcaggcggatcacaatgtcaagagattgagaccatcctggccagcatggtgaggccccctctctactaaaaatacagatactagctgggcctgttggcgcacgcctgtagttccagctactcaggaggctgaggcgggggaatcgcctgggaggtggagattgcagtgagctgagatcgtgccaccgcactccagcctggtgacagagtgagactccgtctcaaaaaaaaaaaaaaaaaaaaaaaaaaa

SEQ ID NO: 106 - DNA, 1155 bp, Homo sapiens
ccgggtcgacccacgcgtccggtgagtgcactctaggatgttcacatgatgacaaaatcacctaacaatgtagacgcttcagaacatataccctttgttaatcgatgcatcactgtatatatgtgtgtatatacacacatatatgtacatatatttaatacatttgtgtatgtgtgtgtatatatatatatatatacttctcattatttatactctagacccagagcctcctagctggtctccaaaattggactctcatctctctttgagacagccttcaaatgatcgtttttaaagtgctaattaactcctcttctcaaaatgcttcaatggcccactaatctctaccgaatcaaggaattcagccatactgtcccaagatatctttccttggccagttggagcctcatttcagctgctctgggtttatcccctgtctcttctttcccacttccaagcctgtgctcagcccacctcctcttctggggatgccccacaccccactctgccatatctgccaaacctttcatctccccgtgaagctcttgacaccaaatacagtttactttagaaaatgtattttttccactttctcaactaaacttttccttgtgtgatctgcttttccgctgccaaggcacatcgtttttaattctctacagcactgctcatatcttgcccagtattatagcttctacatattggtcttgcttcttatttttgagcacaaaaactaagccactccactttctcttaccagtgaatccagcttaaaaaaactgtgagcaacctatcagtattttgttgacatgaactctatagaaaccttagtccctggatcttcgactctgcctcccctgacatttatctgctcccacaaagcacgcaggtgtgggaagagaagtggctgttttttgaggtcacatttcagccctgattcatcctaatgtcttcaccctttttatcctttggscactgtgtycctagagatgtgaattcaattccgcaccattctctcctttacaatgatgccaatattctcaggcttttaagactaaattttaaattacgagaaaatttgatcttcaaacttaagttggacctagaaagaacaatctcatgaactcaaaaaaaaaaaaaaaaaaaaaaaaaaaa

SEQ ID NO: 107 - DNA, 2566 bp, Homo sapiens
  misc_feature (2553)..(2553): n equals a,t,g, or c
gcaaatagcaacttcagtacatcataatataaatagaaaaaaaagatcagtgcttagattgttaatgttttgtttttatttgaattattttactaacttgtttttgtttttaacctgttctcgctcagagtccctctcctccccgacaggaccctattcaggtttccccttcttaaagtctcccccagtgaggaactctctcaacaagggcccactcctggtgcagtactatagcttttcatcccacctcagagtcccccgcaaaaagaaacaagtgatcagagtaccagtcagggtacctcctaaaagcccagcgatgtcccctccatccagtccaaggtttcactttttcaccttttctggtcctttccccaacagctattaatggtattatccattcaggtctttcttcaccccaggccttgtgggaccamccttaatcatccagtggtactgccccctcttaggatataccaccamcgstcacacaggatctccacccagaaacaatgacatctggggtctttctccagtcccctggcatggtatttcttacaaactttctacctcccactggctaatagctttattcaagtasaattacacgccataaaatttactcattttatttttttatttttattaagttaggttgtgttcaggatttactctttttaagtctgcaattcactttttttttggtaaatttagagttgtacagtcatcaccatcatccaattttagcacatttccatcacctcaaaaagatccctcatgcccatttgstgctattccacattataaccttccacccctggcaaccactaatctactttgtgtctgtatarattggctttttctgcatatttcatataaaaatggaacatataatatttggtcttaagtatttttgaaacatataattttgttgtggaaatagtagttgattttatctatgtctttatcaggcctttctctgtattgaattttcacattgtcaataccactcagaaacagtggttyatcctactgcagcaagttcattgaatactgttggcactggaatttatccctgctgtaaccaaaaggtyctycggtttgatcctactcagcttacaaagggctgtaaartgagggaccacatggttacmcttcgtgatcaaggtgaaggsggagatttgccgtcctgtcccactgctagaatgttggacgatttgcacaagtacagagatgtcattgttgtgcctttttcaaaagatacagttagtgatgttggggttggcctctgtgatgaaaagggtatagaatgtgatgttttactggagccaaatacaccatggggtcccaaaactggggagctcaatgctttcttgtcattgaaaaactggactctacaactgaaacaacagtcactgttttcagaagaagaagaatataccactggatctgaggtcactgaagatgaagttggagatgaagaagaagtatccaagaaacaaaggaaaaaggagaagccaaagaagttcactagacmaccaaaaaagcaggtatcttcaccctgtgcccagaggaaagaaaaggcattggagaaggtaactctgaattatctgktgktaaagtcatatggaaaaataagcatgtgagtatagccagaaaaaaataaaaagagtaatgaagacacatggaatgctagcaatgtaaaaatgaagttttttatagactgagattaaagatctctaagatatattgacaaatgagaaaaggaaggtgcagaaacgtatagtggtatagtatgctaccatttgtgtaaagtagatgggggaaatatataaataacttccttgtatatgcataaaatgtttctggaaggctacataagaactcgataaaattggttgcctctcaggaagggaactgaacgtgtaagggacagaagtgagagtcttttcattatatgtgccattataccttttgaattttaaaccaatattatttattcaaaaaattaaaaatagtcttttaaattaaaaataaatcatattttatgatatttaaaaataattcttatttctccatgcctttgaaggaaggggtaaaaaagccaggtaggaataagagaatagtaataaccaccattggctaaaagaaaaactgtgaatttcaaaaatgtgtgataggttgagtctgggttaagatccacagaattacattggacacattgtacattcatctttgtgttaagtagcacaggcatataagtgggttaattctaaaaaaaaattgtatcagctggtcttgagcttttgacctcgtgatctgcccgcctcagcctcctaaagtactgggattataggcgtgagccacaatgcctggccacatttatgtatttttttatattctgtatcagttagcctgtttattcacgtaaaagttttccaccatgtcttattatccatggtccataggtcatctataacacatataataaagtacatcattgctgaaaaaaaaaaaaaaaaaactcgagggggggtcccgtacccaattctcctnacatgcatcgtat

SEQ ID NO: 108 - DNA, 661 bp, Homo sapiens
gaattcggcacgaggggaaaaggatgctgaacgagagcagaaagcctctttcctttgcttcacgcctttccagtctttattttaaactcgggttccctttctgtggtcgcagcaacctttactccacctgcactgctgctcctgggggctccccaggcctccctctgcctttctacccagtggctgacgggatgcctgtcttgcctggacgcaccactgctctcctgtccctcaccttggcttttgctgtgccctgctctggggttgaagctggcccatgtgtcccccggagtcatggctgctcctcctgggaggcctctgtgtgcgtcacgtcttccacacctgggggcagctggcgagcccgtgctctgttcccctcggctgcttggcacagagytgcagcctgggaytctccgtggacccagactggggattttgccaggggggcgatgggaggagcaggtgctttgcctggcggctgtgtctgcatttctggacgccccagagcacagaagttgccggcactttgaggtcttcctcggcatgtgccagattacatgagtgacggctgggaatatgttttcttttttgtaatggaggcgtgtttcacatatagtaaagctcaccaaaaagtaaaaaaaaaaaaaaaaaaaaaactcga

SEQ ID NO: 109 - DNA, 715 bp, Homo sapiens
ggcacgagctttccctcagtccaatcttgcaattgctatgtcagtttcagttcacaataataccagtgcagacatggctccttaagattttctccttttccctcacgcgggtcccaattctaaattcccaagggctgacatgattgacatttgccatagcctgaggagggagcatttccttttgtggtctttccttggtttgttttattgggcagtgaatggcaagtctgtctgtgtttctttgcttcaccccaaacaccttggcaaaaatgaaagccttctaatttagctgtgtcctcctttacttatgtcaggaagcctgagccataacctttgattaaaaaaatttttttttgttttttgtttttgagacagggtcttgctctgtcacccaggctgaaatgcagtggcacgactgcagctcattgcagccttgacctcactggagtgtagtggcatgactgcagctcactgcagtcccaagtagctggcacttacaggcaggtgccaccatgcctggctaatttttaaattttttgtagaaacagggtcttgctggctgggcacggtggctcacacctgtaatcccagcactttgggaggccaaagcgggcggatcacgaggtcaggagtttgagaccagcctggccaacatggtgaaatcctgtttccactaaaaataccaaaaaaaaaaaaaaaaaaaaaaaaactcgta

SEQ ID NO: 110 - DNA, 407 bp, Homo sapiens
  misc_feature (352)..(352): n equals a,t,g, or c
  misc_feature (376)..(376): n equals a,t,g, or c
  misc_feature (378)..(378): n equals a,t,g, or c
ctttctgggtttagggaagtggtggacaaggcaggagagaaccacattcatcttctcctcttgtgtttgtcttctgtctttcaataacgtccatgaactgtgaggttagtgtcttggctgagagataagtawggctkggcatkgattcttytgtkgtwacctcaagctgttttctagtccccaagaacagcaytytcagtgggtgtggaagtgggcgggacatgaagcaatggttttacattgcattgcctggctacagsttggcatttctttcctttttctttttctttgcgtcattgccattggtgccactaattttgcttcccctytcttttataaacttgtttcctcnggagttgcctaagagtcctgcatnanaacctaattgggaatgaagcagtgtgttc

SEQ ID NO: 111 - DNA, 711 bp, Homo sapiens
ggcacgagcgaagaccctgttcggaccctgccccgattccagactcaggtagatcgtcggcataccctctaccgtggacaccaggcagccctggggctgatggagagagatcaggtatcccccagggagtaggggctaccttgaggggatgatagacctcccccactcccagtgkkactctggaaatatgaaggaactagggagtggaagagatttcagagctggggagaggagttcctcccttcaaagccagcaactgcctttggggaatgtcggggggtctctcctttctcctgcttgtgtkargtggtacacagtccccccttcacctggcgggaagctgtcccggacagactcatctcagctttcccttggggcaggatcgggggcagcagctccagcagaaacagcaggatctggagcaggaaggcctcgaggccacacaggggctgctggccggcgagtgggccccacccctctggragctgggcagcctcttccaggccttcgtgaagagggagagccaggcttatgcgtaagcttcatagcttctgctggcctggggtggacccaggacccctggggcctgggtgccctgagtggtggtaaagtggagcaatcccttcacgctccttggccatgttctgagcggccagcttggcctttgccttaataaatgtgctttattttcaaaaaaaaaaaaaaaaaact

SEQ ID NO: 112 - DNA, 875 bp, Homo sapiens
ggcacgagtgccagtgtcccgtgccctccagtgtcaaagatttggggcactgcccgtcgaaatggaaaggttggtgctcagcctctggagcctcacctgcagggcgtccccagctaacacccatccacgcaccacctccaggacgagaacccttgatgtcaaaaccaagtgcccagtggaggcggtgaagctctcggaaatgctgccacctgtgtgaggccgggtctgaactcgagggagtcggagctcagctgtcggtttaaagagacactgaggggaccgggctgccgccctcagcctgcattcctgtgcgcaatcgattccgcaatgacagcaccttactccttcctgcggcaggctcacccctgcctgtgggatgttgtgagaggaacatgagccagacaaagacttggctcagggctccgtggaacaagccaggatgcacggggagctgggggagcccccascctggggcagcccagcaggccgctgaacaaacaccccagaagccagcactgtggcagggtgctggggagatgcccctctgagccttcctcccccctcagacctgaatgcaccccacagttgggggctgcccctgcccactcccctggtaatgcataaaaggggaggggaaggttccctggggcttgagctccctctgtggaggtgaggaggggagattccgttcacatcccaggaggggcaaaatgactgatgtatttttatgtatctacacagagagtgcattttctctccagagatgctgtctggttaacaaaggaataacttaagaaattgattgattatcttaataaactgtgcaaacccaamrrraaaaaaaaaaaaaaaaaaaaaaaaaaaaaaactcgtag

SEQ ID NO: 113 - DNA, 2152 bp, Homo sapiens
ccgctttgttctccagatgtgaatagctccactataccagcctcgtcttccttccgggggacaacgtgggtcagggcacagagagatatttaatgtcaccctcttggggctttcatgggactccctctgccacattttttggaggttgggaaagttgctagaggcttcagaactccagcctaatggatcccaaactcgggagaatggctgcgtccctgctggctgtgctgctgctgctgctgctggagcgcggcatgttctcctcaccctccccgcccccggcgctgttagagaaagtcttccagtacattgacctccatcaggatgaatttgtgcagacgctgaaggagtgggtggccatcgagagcgactctgtccagcctgtgcctcgcttcagacaagagctcttcagaatgatggccgtggctgcggacacgctgcagcgcctgggggcccgtgtggcctcggtggacatgggtcctcagcagctgcccgatggtcagagtcttccaatacctcccgtcatcctggccgaactggggagcgatcccacgaaaggcaccgtgtgcttctacggccacttggacgtgcagcctgctgaccggggcgatgggtggctcacggacccctatgtgctgacggaggtagacgggaaactttatggacgaggagcgaccgacaacaaaggccctgtcttggcttggatcaatgctgtgagcgccttcagagccctggagcaagatcttcctgtgaatatcaaattcatcattgaggggatggaagaggctggctctgttgccctggaggaacttgtggaaaaagaaaaggaccgattcttctctggtgtggactacattgtaatttcagataacctgtggatcagccaaaggaagccagcaatcacttatggaacccgggggaacagctacttcatggtggaggtgaaatgcagagaccaggattttcactcaggaacctttggtggcatccttcatgaaccaatggctgatctggttgctcttctcggtagcctggtagactcgtctggtcatatcctggtccctggaatctatgatgaagtggttcctcttacagaagaggaaataaatacatacaaagccatccatctagacctagaagaataccggaatagcagccgggttgagaaatttctgttcgatactaaggaggagattctaatgcacctctggaggtacccatctctttctattcatgggatcgagggcgcgtttgatgagcctggaactaaaacagtcatacctggccgagttataggaaaattttcaatccgtctagtccctcacatgaatgtgtctgcggtggaaaaacaggtgacacgacatcttgaagatgtgttctccaaaagaaatagttccaacaagatggttgtttccatgactctaggactacacccgtggattgcaaatattgatgacacccagtatctcgcagcaaaaagagcgatcagaacagtgtttggaacagaaccagatatgatccgggatggatccaccattccaattgccaaaatgttccaggagatcgtccacaagagcgtggtgctaattccgctgggagctgttgatgatggagaacattcgcagaatgagaaaatcaacaggtggaactacatagagggaaccaaattatttgctgcctttttcttagagatggcccagctccattaatcacaagaaccttctagtctgatctgatccactgacagattcacctcccccacatccctagacagggatggaatgtaaatatccagagaatttgggtctagtatagtacattttcccttccatttaaaatgtcttgggatatctggatcagtaataaaatatttcaaaggcacagatgttggaaatggtttaaggtcccccactgcacaccttcctcaagtcatagctgcttgcagcaacttgatttccccaagtcctgtgcaatagccccaggattggattccttccaaccttttagcatatctccaaccttgcaatttgattggcataatcactccggtttgctttctaggtcctcaagtgctcgtgacacataatcattccatccaatgatcgcctttgctttaccaytctttccttttatcttattaataaaaatgttg

SEQ ID NO: 114 - DNA, 1555 bp, Homo sapiens
  misc_feature (1248)..(1248): n equals a,t,g, or c
  misc_feature (1389)..(1389): n equals a,t,g, or c
  misc_feature (1391)..(1391): n equals a,t,g, or c
  misc_feature (1393)..(1393): n equals a,t,g, or c
  misc_feature (1396)..(1396): n equals a,t,g, or c
  misc_feature (1551)..(1551): n equals a,t,g, or c
ggcacgagctgggcagatgcaaaatctggagagcgcgagggccgggcggtcagtcagcacccagactggcagcatgaccggtcagataccaaggctttctaaagtcaaccttttcactctgctcagcctctggatggagctctttccagcagaagcccagcggcaaaaatctcagaaaaatgaagagggaaagcatggacccttaggagataatgaagagaggaccagagtatctactgacaaaagacaggattactgggagcagctaagatgcctaratgaaaggtttaccatcactgctggttaggaaatggattatgagaactcgaacagagggaaggtgaaatgcaaccggaggaaacactctgatatgaggtttgaggccttcaaaattgctttgcagcataagccacagtgagtcaggagtaccagggagtggatagaatgtttatttgtttaactgagactttttagttcatcaattattttgaagggtagaacactctgtgggctctctttctatttccttctgggtacaatcacaaaaaaaaaatctctcctagctgaaattacatgcagtactagcaaagggtctctttgttataaactgttcattaattgacgaacatttgtgtacttaactatgtataaggcatctcatcgttcaatttcaaatacaaattaaaatattttttcacatttgttatcctgttatgttttctcttttacaaattgtctgttcgtatctttttgtctctctttaggccttattcttgtcaattcatatgtgctctaatgaattgaaatattttctgtatattaaacattactaacctttcctctgtcacactgattgaaaaatgatctatttagtttgttgttttgtctttaattttgtaagctttaaaaagttaatattgcccttcagacaccatcccaacatcacataagaattttttcatgttataaattctttgtggacatatttgataactgttttattatgaggaggaccataattaattcaaccattcccctattttggtcatttaggtttttgggtttgggttttttgtttgtttaacgtctttgcttgctattttaaagaatgctgcactaaatgtgaatgcttgagatttcttctctgtatttagaatattttcctagaatggattctcagaagaattctcagtctgtggagaggaacatttttaatgcatggaagagctggagtgaaccgaatttcanactgccctgctgatccagaaataagtttgcttacggaggcttctagttctgaagatgcaaagttagatgccaaagcagtggaaagattgaagtcaaacagtcgggcccatgtgtgtgtcttacttcaacctttggtgtgtnananggngcagtttgtagaggagacctcttacaaatgtgactttattcaaaaaattacaaaaacattgccggatgctaacactgacttttattatgaatgtaaacaagaaagaataaaagaatatgaaatgttaaaaaaaaaaaaaaaaaaaaaaaaaaaanaaaa

SEQ ID NO: 115 - DNA, 575 bp, Homo sapiens
ggcacgagtgcaggaattcgtgtgccggatttggttagctgagcccaccgagaggcgcctgcaggatgaaagctctctgtctcctcctcctccctgtcctggggctgttggtgtctagcaagaccctgtgctccatggaagaagccatcaatgagaggatccaggaggtcgccggctccctaatatttagggcaataagcagcattggcctggagtgccagagcgtcacctccaggggggacctggctacttgcccccgaggcttcgccgtcaccggctgcacttgtggctccgcctgtggctcgtgggatgtgcgcgccgagaccacatgtcactgccagtgcgcgggcatggactggaccggagcgcgctgctgtcgtgtgcagccctgaggtcgcgcgcagcgcgtgcacagcgcgggcggaggcggctccaggtccggaggggttgcgggggagctggaaataaacctggagatgatgatgatgatgatgatggaaaaaaaaaaaaaaaaaaaaaaaaaaaaaaaaaaaaaaaaaaaaaaaaaaaaaaaaaaaaaaaaaaaaaaaaaaaaa

SEQ ID NO: 116 - DNA, 1532 bp, Homo sapiens
  misc_feature (1412)..(1412): n equals a,t,g, or c
  misc_feature (1433)..(1433): n equals a,t,g, or c
  misc_feature (1446)..(1446): n equals a,t,g, or c
  misc_feature (1505)..(1505): n equals a,t,g, or c
gctggagcggtttcattgcctacattccgcattggaaaatagaagcaggcacaatgaagggaaaaggccgaggcatcagcgtgtgaagaccgcaaagacgatcccgagtacagttgtgaacagcattgctgctaggctcctcctgcagatcatctgaaatgaacctctcttattgatttttattggcctagagccaggagtactgcattcagttgactttcagggtaaaaagaaaacagtcctggttgttgtcatcataaacatatggaccagtgtgatggtgaaatgagatgaggctccgcaatggaactgtagccactgctttagcatttatcacttccttccttactttgtcttggtatactacatggcaaaatgggaaaggtaaggaaaatgactcggaaaatgtgcatgaaatgtactagggtttttgcttggttaaggtgcctaaatgcttaggtcaaataccctggcaatctgcatgttacatgctatctgctggcagtttctttctgatataaaaatgaaacagtattcttggacagaggacacagaatttctaattccagtggggcttgttttgctttcagtttcttataattgtacttggagaaacagatactgatcagtgttttatattctaaaagacagccaagttgaataataaagactttcgttttggcattttgttctttttactaaacataattaagtgtttaataagcttccttgtaccgagtgttgcataaaacacttaaaaggacacaattagtgccttcgtgagatttacatgctaattatgctaaygattgggtgctatgtagttaatgatttaaactgcatgcattgacagattactccttaggcaaaagtatttaagaagggataagtagaaattctgattggaatattaaaacattttttaaaaattaattatgkttagactgktgaaccgkgttatataattttaggataawggattwatttgctttttttttttttaagagaaactacttgaagtaaattcctacccatacttcttacttgtctcctttcctttgattaatctaaggaatgktgatgatgagaagaaagatggaaatgttgaggtggttgcatatttggtttgttagaatatctgtcatcacctgggctwtttgaagctgctgttgctgatgttgttttattgactcatgaagacaactgaaaagattgctttgtaaccttatttttttctgatgtgtgtttacatccatgtctatatatacatattgcatatgtatatatctgtatgtgcatgtatatgttaaaaatctgatataagtgaaaacatgctctgtgctttgaaacaaaaaaaaaaaaaaaaaactcgagggggggcccggtacccaattcgccctatagtgagtcgnattacaattcactggccgcgntttacaacgtcgngactgggaaaaccctggcgttacccaacttaatcgccttgcagcacatccccctttcgncagctggcgtaatagcgaagaggcccg

SEQ ID NO: 117 - DNA, 1559 bp, Homo sapiens
  misc_feature (1445)..(1445): n equals a,t,g, or c
  misc_feature (1551)..(1551): n equals a,t,g, or c
atccagcagtggggagacagcgtgctgggcaggcgctgccgagaccttctcctgcagctctacctacagcggccggagctgcgggtgcccgtgcctgaggtcctactgcacagcgaaggggctgccagcagcagcgtctgcaagctggacggactcatccaccgcttcatcacgctccttgcggacaccagcgactcccgggcgttggagaaccgaggggcggatgccagcatggcctgccggaagctggcggtggcgcacccgctgctgctgctcaggcacctgcccatgatcgcggcgctcctgcacggccgcacccacctcaacttccaggagttccggcagcagaaccacctgagctgcttcctgcacgtgctgggcctgctggagctgctgcagccgcacgtgttccgcagcgagcaccagggggcgctgtgggactgccttctgtccttcatccgcctgctgctgaattacaggaagtcctcccgccatctggctgccttcatcaacaagtttgtgcagttcatccataagtacattacctacaatgccccagcagccatctccttcctgcagaagcacgccgacccgctccacgacctgtccttcgacaacagtgacctggtgatgctgaaatccctccttgcagggctcagcctgcccagcagggacgacaggaccgaccgaggcctggacgaagagggcgaggaggagagctcagccggctccttgcccctggtcagcgtctccctgttcacccctctgaccgcggccgagatggccccctacatgaaacggctttcccggggccaaacggtggaggatctgctggaggttctgagtgacatagacgagatgtcccggcggagacccgagatcctgagcttcttctcgaccaacctgcagcggctgatgagctcggccgaggagtgttgccgcaacctcgccttcagcctggccctgcgctccatgcagaacagccccagcattgcagccgctttcctgcccacgttcatgtactgcctgggcagccaggactttgaggtggtgcagacggccctccggaacctgcctgagtacgctctcctgtgccaagagcacgcggctgtgctgctccaccgggccttcctggtgggcatgtacggccagatggaccccagcgcgcagatctccgaggccctgaggatcctgcatatggaggccgtgatgtgagcctgtggcagccgacccccctccaagccccggcccgtcccgtccccggggatcctcgaggcaaagcccaggaagcgtgggcgttgctggtctgtccgaggaggtgagggcgccgagccctgaggccaggcaggcccaggagcaatactccgagccctggggtggctccgggccggccgctggcatcaggggccgtccagcaagccctcattcaccttctgggccacagncctgcgcggagcggcggatccccccgggcatggcctgggctggttttgaatgaaacgacctgaactgtcaaaaaaaaaaaaaaaaaaacccgrgggggggcccggnacccaatt

SEQ ID NO: 118 - DNA, 1231 bp, Homo sapiens
ggcacgagtgaatgtcgaggagttccaggatctctggcctcagttgtccttggttattgatgggggacaaattggggatggccagagccccgagtgtcgccttggctcaactgtggttgatttgtctgtgcccggaaagtttggcatcattcgtccaggctgtgccctggaaagtactacagccatcctccaacagaagtacggactgctcccctcacatgcgtcctacctgtgaaactctgggaagcaggaaggcccaagacctggtgctggatactatgtgtctgtccactgacgactgtcaaggcctcatttgcagaggccaccggagctagggcactagcctgacttttaaggcagtgtgtctttctgagcactgtagaccaagcccttggagctgctggtttagccttgcacctggggaaaggatgtatttatttgtattttcatatatcagccaaaagctgaatggaaaagttaagaacattcctaggtggccttattctaataagtttcttctgtctgttttgtttttcaattgaaaagtaattaaataacagattagaatctagtgagagcctcctctctggtgggtggtggcatttaaggtcaaaccagccagaagtgctggtgctgtttaaaaagtctcaggtggctgcgtgtggtggctcatgcctgtaatcccaacattctgggaggcccaggcgggagaactgcttgagccccaggagttcagaatcagcctgggcaacatagcaatactccgtctcataaaaattaataaataaaaagtctcaggtgaccaaaggctcctgaagctagaaccaggtttggataaagattgaagagccacaggccactcttccctctgagccattgggcctagtggtgtcatgtattgtaattgctcgcagggagagcagtctttttggtgtaatagtgggatgtctgcttagttggcaggggttcagtccaaatggaagaatattgggaaataaacctccactatcctttatagccagggacttttttcctatttattcataaaataaattatagttaattatacccataacacctttatttaaatccagtgttctccgcagccttttgtctatttatatgtgtaccaagtgttaaacataattattattgggcatttgaactttgtttttctttaaagaaatgctgctattaaacatatttgtaaatggaaaaaaaaaaaaaaaaa

SEQ ID NO: 119 - DNA, 1189 bp, Homo sapiens
gcgtccgctgggctggaacagcacagaacccacagggctgccgtccacactctcccggtcagagtcctgggaccacatggggacgctgccatggcttcttgccttcttcattctgggtctccaggcttgggatactcccaccatcgtctcccgcaaggagtggggggcaagaccgctcgcctgcagggccctgctgaccctgcctgtggcctacatcatcacagaccagctcccagggatgcagtgccagcagcagagcgtttgcagccagatgctgcgggggttgcagtcccattccgtctacaccataggctggtgcgacgtggcgtacaacttcctggttggggatgatggcagggtgtatgaaggtgttggctggaacatccaaggcttgcacacccagggctacaacaacatttccctgggcatcgccttctttggcaataagataagcagcagtcccagccctgctgccttatcagctgcagagggtctgatctcctatgccatccagaagggtcacctgtcgcccaggtatattcagccacttcttctgaaagaagagacctgcctggaccctcaacatccagtgatgcccaggaaggtttgccccaacatcatcaaacgatctgcttgggaagccagagagacacactgccctaaaatgaacctcccagccaaatatgtcatcatcatccacaccgctggcacaagctgcactgtatccacagactgccagactgtcgtccgaaacatacagtcctttcacatggacacacggaacttttgtgacattggatatcaataaggccaggcgtggcggcgattacgtctgtaatcccaggactttgggaggccaaggcgggcagatcacttcaggccaggaattcaagagcagcctggccaatatggcgaaactctgtctctactgaaaacaaacaaacaaacaaacaaacaaacaaagaaacaacaaaaattagccgggtgtggtggcacacgcctgtagtcccagctactcaggaggctgaggcataagaattgcttgaaccctggaggcggaggttgcagtgagctgagattgggccaccgcactccagtctgggagacagagtgagactgtctcaaaacaacaacaaaaaaatccctaacataatctcaaaaaaaaaaaaaaaaaaaaaaaaaaaaaaaa

SEQ ID NO: 120 - DNA, 3153 bp, Homo sapiens
  misc_feature (1)..(1): n equals a,t,g, or c
  misc_feature (2584)..(2584): n equals a,t,g, or c
  misc_feature (2590)..(2590): n equals a,t,g, or c
  misc_feature (3153)..(3153): n equals a,t,g, or c
nggccgtgggtgtacgcggcgcagcgcggcagtcctgatggcccggcatgggttaccgctgctgcccctgctgtcgctcctggtcggcgcgtggctcaagctaggaaatggacaggctactagcatggtccaactgcagggtgggagattcctgatgggaacaaattctccagacagcagagatggtgaagggcctgtgcgggaggcgacagtgaaaccctttgccatcgacatatttcctgtcaccaacaaagatttcagggattttgtcagggagaaaaagtatcggacagaagctgagatgtttggatggagctttgtctttgaggactttgtctctgatgagctgagaaacaaagccacccagccaatgaagtctgtactctggtggcttccagtggaaaaggcattttggaggcagcctgcaggtcctggctctggcatccgagagagactggagcacccagtgttacacgtgagctggaatgacgcccgtgcctactgtgcttggcggggaaaacgactgcccacggaggaagagtgggagtttgccgcccgagggggcttgaagggtcaagtttacccatgggggaactggttccagccaaaccgcaccaacctgtggcagggaaagttccccaagggagacaaagctgaggatggcttccatggagtctccccagtgaatgctttccccgcccagaacaactacgggctctatgacctcctggggaacgtgtgggagtggacagcatcaccgtaccaggctgctgagcaggacatgcgcgtcctccggggggcatcctggatcgacacagctgatggctctgccaatcaccgggcccgggtcaccaccaggatgggcaacactccagattcagcctcagacaacctcggtttccgctgtgctgcagacgcaggccggccgccaggggagctgtaagcagccgggtggtgacaaggagaaaagccttctagggtcactgtcattccctggccatgttgcaaacagcgcaattccaagctcgagagcttcagcctcaggaaagaacttccccttccctgtctcccatccctctgtggcaggcgcctctcaccagggcaggagaggactcagcctcctgtgttttggagaaggggcccaatgtgtgttgacgatggctgggggccaggtgtttctgttagaggccaagtattattgacacaggattgcaaacacacaaacaattggaacagagcactctgaaaggccattttttaagcattttaaaatctattctctccccctttctccctggatgattcaggaagctgacattgtttcctcaaggcagaattttcctggttctgttttctcagccagttgctgtggaaggagaatgctttctttgtggcctcatctgtggtttcgtgtccctctgaaggaaactagtttccactgtgtaacaggcagacatgtaactatttaaagcacagttcagtcctaaaagggtctgggagaaccagatgatgtactaggtgaagcattgcattgtgggaatcacaaagcaaatagtactccagaaagacaaatatcagaagcttcctattcttttttttttttttttttttttgagacagggtctttctctgttgcccaggctagagtgcactggtgatcacggctcactctagccttgaattcctgggcccaagcaattctcccacctcagcctcctgagtagctgggactacaagtgtgcaccaccatgcctggctaattttttgaatttttgtagtgatgggatctcgctctgttgcccagggtggtctcgaactcctggcctcaagcgatcctcccacctcgacctcccaaagtgctgggattacaggtgtgagccacctcgcctgggcccccttctccatatgcctccaaaaacatgtccctggagagtagcctgctcccacactgtcactggatgtcatggggccaataaaatctcctgcaattgtgtatctcagacatttgtgtctttgatcctcaccctgtgaccctaaagggaagaaagcctgagtgtcaagtaactctgggcctcccctaaagagaaatggagatggtggctcatctaggaagtagaggagcagggggttcctggttctcaggccacgtgtgatctctgcccacccagggcctgccccagcctgcaggtattgctgtgtggtgggaacacccacttcccttgtgcacagcctttgagaggggatcgtggcctcagttccaggggttcctggccagggccaagtgctccttctgcagaggcctgcacgcatctcacccctttgacttgtatttccatggcttcccctccccacctgccccctagccctccctgactggccagcccctcagtagtcctcctcggccagggagaggagcacggccttgggtgtgttctcgaaaagggctgcccggttctgctgctgccccttcttcacccagtggccatagattcggaaagcgtaggcgtcgatgagccggcgcagaggccggagggcataggggtctcggatgacgatctcccgggtcacaggcttcacccggcgntactgntagtagatccgcactgaagccagcacggtcagagcgatcaccttgaacttcccccgggggctgaagtgccgcacttcctctaccaagtactgctggaagaaggggtgtgccaaggcctcttccgctgtgtagcggttctggggttgcaccaccaggaatcgggagaccaggtccttcacggtgtccgagtaatcatcccactcgggcgagccaaactggtagttgccgctcatgatcatcctcagcatcagcatctgcttccggtgccagaagggcggggagccggccagcagcgtgtacatgatgacgccagtgctccacatgtccacctctttcccgtagcccgggtggtcctcattcatggagcactcgataatctcaggggccaggtaactgggggtcccgcagacctctcgcagcctctctcccggctccagctggcaggaaaagccaaagtctgtgagcttgatgttcatgttgtcatccaagagaatgttctcgggcttcaggtcccggtgcacgatgttgagtttgtgcaaggtgcagatcacctccagcagagn

SEQ ID NO: 121 - DNA, 2496 bp, Homo sapiens
  misc_feature (2340)..(2340): n equals a,t,g, or c
  misc_feature (2373)..(2373): n equals a,t,g, or c
ggccttacctactagcggaatcgactgaagagacgcctgccagtgcgggaggtaggaagctcgatccccaaagaaaagagcgagtgggcaggcagctgcgagacagaaccggagtgtgcagggtccctagaggccggttcctggtctgtgctgctctcctggaagccatggtacaggcagagctcagggcgatccccaggtgagggcagcggctctgcctgggattccaccgcagtacaaccgggtagatgcggggtggagaagaaaggatgttgcctgcactgctcgccaatagcaccctgagaggctacatttgcagaagcagcagcagcagaagacacagcgccggtccaggaggcggctcgagctgttcgtaaagtcgcccgacagctttttctccgtagtatgcgagttgacaaaacagccagagaacagggctccccattacaatcttttcgagatcttttcccttgctaaccggatctgatttgtgcgaaaacatgccttgcacttgtacctggaggaactggagacagtggattcgacctttagtagcggtcatctacctggtgtcaatagtggttgcggttcccctatgcgtgtgggaattacagaaactggaggttggaatacacaccaaggcttggtttattgctggaatctttttgctgttgactattcctatatcactgtgggtgatattgcaacacttagtgcattatacacaacctgaactacaaaaaccaataataaggattctttggatggtacctatttacagtttagatagttggatagctttgaaatatcccggaattgcaatatatgtggatacctgcagagaatgctatgaagcttatgtaatttacaactttatgggattccttaccaattatctaactaaccggtatccaaatctggtattaatccttgaagccaaagatcaacagaaacatttccctcctttatgttgctgtccaccatgggctatgggagaagtattgctgtttaggtgcaaactaggtgtattacagtacacagttgtcagacctttcaccaccatcgttgctttaatctgtgagctgcttggtatatatgacgaagggaactttagcttttcaaatgcttggacttatttggttataataaacaacatgtcacagttgtttgccatgtattgtctcctgctcttttataaagtactaaaagaagaactgagcccaatccaacctgttggcaaatttctttgtgtaaagctggtggtttttgtttctttttggcaagcagtagttattgctttgttggtaaaagttggcgttatttctgaaaagcatacgtgggaatggcaaactgtagaagctgtggccaccggactccaggattttattatctgtattgagatgttcctcgctgccattgctcatcattacacattctcatataaaccatatgtccaagaagcagaagagggctcatgctttgattcctttcttgccatgtgggatgtctcagatattagagatgatatttctgaacaagtaaggcatgttggacggacagtcaggggacatcccaggaaaaaattgtttcccgaggatcaagatcaaaatgaacatacaagtttattatcatcatcatcacaagatgcaatttccattgcttcttctatgccaccttcacccatgggtcactaccaagggtttggacacactgtgactccccagactacacctaccacagctaagatatctgatgaaatccttagtgatactataggagagaaaaaagaaccttcagataaatccgtggattcctgaacagtatggaaaagcaaactgtgcaactactacattatatcattacctggtatcccatggattttgtgcttgggacagaccataaatgatggaaaatgtcaacacaaaaatagctgaaagccaggtacaactactgcatttatatatgtaagttttgtatatcaaaaataattggtctaaatttcctagacttagacttgatttcttaacattagggtatcgcatactcaaatggtagacaatgaccccaactaaatcttcctgatgttacactgctttatcaagaggatggactttttttttttgaggcagacagagtcttggctctgtcacccaggctggagtgcagtggcgcaatctcgggtcactgcaagctctgcctcccaagttcatgccattctcctgcctcagcctcccaagtagctgcgactacaagcacctgccaccatgcccagctaattttttttttcagtagagacagggtctcaccatgttagccacgatgctcttgatctgaccttgngatcccgcgacctcggccttccaaagtgctggnaatacaggcgtgagccactgggccttgccaagattgggcactttttaacatcagaacttcctatcactgctgcattgagttgctccgcatttattagaagcattatgcctgtacggattgggg

SEQ ID NO: 122 - DNA, 1001 bp, Homo sapiens
  misc_feature (919)..(919): n equals a,t,g, or c
cgcgctggaaccctgtggcggcggccatggccatatggcgctgcccgcctggctgcagccaggtataggaagaatgcgtatcttttcatctattacttaatccagttctgtggccactcttggatatttacaaatatgacagtcagattcttttcatttggaaaaggtaaaactccgaaacagtttttttatttttaacttttaatccttgttttcacctcatcctgcttatattaaatttctacacacctcaaccttctaccacgggatacagattcaatggttgacactttttatgctattggacttgtgatgcgactttgccaatccgtatctctcctggaactgctgcacatatatgttggcattgagtcaaaccatcttctcccaaggtttttgcagctcacagaaagaataatcatcctttttgtggtgatcaccagtcaagaggaagtccaagagaaatatgtggtgtgtgttttattcgtcttttggaatctattggatatggttaggtacacttatagcatgttatcagtcataggaatatcctatgctgtcttgacatggctcagtcaaacactatggatgccaatttatcctttgtgtgttcttgctgaagcatttgccatctatcaatcgctgccttattttgaatcatttggcacttattccaccaagctgccctttgacttatccatctatttcccatatgtgctgaaaatatatctcatgatgctctttataggtatgtattttacctacagtcatctatactcagaaagaagagacatcctcggaatctttcccattaaaaaaaagaagatgtgaagtacagcattccagtgtgacacgagaaaagacaggctgtggattcagtgcagtaaataaaacacaggaagtattctggtggaaaaanaaaaaaaaaaaaaaaaaaaaraaraaaaaaaaawaaaaaaaaaaaaaaaaaaaaaaaaaaaaaaaaaaaaaaaaaaaaaaaa

SEQ ID NO: 123 - DNA, 1142 bp, Homo sapiens
gaagaagtgacacttcttggtcagaatgttaatagttttcgggacaattcggaggtccagttcaacagtgcagtgcctaccaatctcagtcgtggctttaccaccaactataaaaccaagcaaggaggacttcgttttgctcatcttctggatcaggtctccagagtagatcctgaaatgaggatccgttttacctctccccaccccaaggattttcctgatgaggttctgcagctgattcatgagagagataacatctgtaaacagatccacctgccagcccagagtggaagcagccgtgtgttggaggccatgcggaggggatattcaagagaagcttatgtggagttagttcaccatattagagaatctattccaggtgtgagcctcagcagcgatttcattgctggcttttgtggtgagacggaggaagatcacgtccagacagtctctttgctccgggaagttcagtacaacatgggcttcctctttgcctacagcatgagacagaagacacgggcatatcataggctgaaggatgatgtcccggaagaggtaaaattaaggcgtttggaggaactcatcactatcttccgagaagaagcaacaaaagccaatcagacctctgtgggctgtacccagttggtgctagtggaagggctcagtaaacgctctgccactgacctgtgtggcaggaatgatggaaaccttaaggtgatcttccctgatgcagagatggaggatgtcaataaccctgggctcagggtcagagcccagcctggggactatgtgctggtgaagatcacctcagccagttctcagacacttaggggacatgttctctgcaggaccactctgagggactcttctgcatattgctgacctgagaggatggcctcagagctgacttgggcaatcctccccaacaggaaggggagacattgcctgccactgaggaaacaggtcatgaaggtggagataagctgcaaggggcgaagcaactttatgtcagtggaaaacgtgtctctttaaagctgctatgtgaacagcttttacagtcattaaatttacctaaactaaggttaaaaaaaaaaaaaaaaaaaaaaaaaaaaaaaaaaaaaaaaaaaaagggcggccgctct

SEQ ID NO: 124 - DNA, 2238 bp, Homo sapiens
  misc_feature (12)..(12): n equals a,t,g, or c
  misc_feature (45)..(45): n equals a,t,g, or c
tgtccttgttgncgcggctgaagtacgccgtgggccacttcctcnaacgacctgtgcgcgtccatgtggttcacctacctgctgctctacctgcactcggtgcgcgcctacagctcccgcggcgcggggctgctgctgctgctgggccaggtggccgacgggctgtgcacaccgctcgtgggctacgaggccgaccgcgccgccagctgctgcgcccgctacggcccgcgcaaggcctggcacctggtcggcaccgtctgcgtcctgctgtccttccccttcatcttcagcccctgcctgggctgtggggcggccacgcccgagtgggctgccctcctctactacggcccgttcatcgtgatcttccagtttggctgggcctccacacagatctcccacctcagcctcatcccggagctcgtcaccaacgaccatgagaaggtggagctcacggcactcaggtatgcgttcaccgtggtggccaacatcaccgtctacggcgccgcctggctcctgctgcacctgcagggctcgtcgcgggtggagcccacccaagacatcagcatcagcgaccagctggggggccaggacgtgcccgtgttccggaacctgtccctgctggtggtgggtgtcggcgccgtgttctcactgctattccacctgggcacccgggagaggcgccggccgcatgcggaggagccaggcgagcacacccccctgttggcccctgccacggcccagcccctgctgctctggaagcactggctccgggagccggctttctaccaggtgggcatactgtacatgaccaccaggctcatcgtgaacctgtcccagacctacatggccatgtacctcacctactcgctccacctgcccaagaagttcatcgcgaccattcccctggtgatgtacctcagcggcttcttgtcctccttcctcatgaagcccatcaacaagtgcattgggaggaacatgacctacttctcaggcctcctggtgatcctggcctttgccgcctgggtggcgctggcggagggactgggtgtggccgtgtacgcagcggctgtgctgctgggtgctggctgtgccaccatcctcgtcacctcgctggccatgacggccgacctcatcggtccccacacgaacagcggagcgttcgtgtacggctccatgagcttcttggataaggtggccaatgggctggcagtcatggccatccagagcctgcacccttgcccctcagagctctgctgcagggcctgcgtgagcttttaccactgggcgatggtggctgtgacgggcggcgtgggcgtggccgctgccctgtgtctctgtagcctcctgctgtggccgacccgcctgcgacgctcccgaggcggagaacaccgaacacccagtgaaggtgaggggatcagcacggcgccgccaccgtgctggaacgagactcagccacaaggaggtgcgaagctctgacccaggccacagtgcggatgcaccttgaggatgtcacgctcagtgagagacaccagacacagaagggtacgctgtgatcccacttctatgaaatgtccaggacagaccaatccacagaatcagggagaggattcgtgggtgccgggactgaggagggggacctgggggtgactaggtgacataatggggatcagcacgggcggcaccagcacacacgtgctggaatgagaactcagccacaaggggaggtgcgaagttctgacccaggccacagtgcggatgcacctttgaggatgtcacgctcagtgagagacaccagacacagaagggtacgctgtgatcccacttctatgaaatgtccaggacagaccaatccacagaatcagggagaggattcgtgggtgccgggactggggagggggacctgggggtgactaggtgacataatggggacaagggctgcctttctggggtgatgagaatgttctggaatcagaatgggatggctgcacggcgtggttgaagggtactgaaggccacccttcagtgtacgaaggggtagatttttgtatttttaccaacaataaacaaaaagaaaagaaaacaaacaaaaaaaaaaagaaaaagataaaaagaatagagaacaagaaagaaaaaaaaaaaaacaaggggggactttttgggcgggggagaaagggtataaagggcgcggggtcaaaggtttcgagcacccttttttacaagagggaataggggcccata

SEQ ID NO: 125 - DNA, 1052 bp, Homo sapiens
acgcgtccggccagccagtccgcccgtccggagcccggctcgctggggcagcatggcggggtcgccgctgctctgggggccgcgggccgggggcgtcggccttttggtgctgctgctgctcggcctgtttcggccgccccccgcgctctgcgcgcggccggtaaaggagccccgcggcctaagcgcagcgtctccgcccttggctgagactggcgctcctcgccgcttccggcggtcagtgccccgaggtgaggcggcgggggcggtgcaggacctggcgcgggcgctggcgcatctgctggaggccgaacgtcaggagcgggcgcgggccgaggcgcaggaggctgaggatcagcaggcgcgcgtcctggcgcagctgctgcgcgtctggggcgccccccgcaactctgatccggctctgggcctggacgacgaccccgacgcgcctgcagcgcagctcgctcgcgctctgctccgcgcccgccttgaccctgccgccctagcagcccagcttgtccccgcgcccgtccccgccgcggcgctccgaccccggcccccggtctacgacgacggccccgcgggcccggatgctgaggaggcaggcgacgagacacccgacgtggaccccgagctgttgaggtacttgctgggacggattcttgcgggaagcgcggactccgagggggtggcagccccgcgccgcctccgccgtgccgccgaccacgatgtgggctctgagctgccccctgagggcgtgctgggggcgctgctgcgtgtgaaacgcctagagaccccggcgccccaggtgcctgcacgccgcctcttgccaccctgagcactgcccggatcccgtgcaccctgggacccagaagtgcccccgccatcccgccaccaggactgctccccgccagcacgtccagagcaacttaccccggccagccagccctctcacccgaggatccctaccccctggccccacaataaacatgatctgaagcagcaaaaaaaaaaaaaaaaaaaaaaaaaaaaaaaaaaaaaaaaaaaaaaaaaaa

SEQ ID NO: 126 - DNA, 1492 bp, Homo sapiens
gccttcccacactccattccctgtcaagttatggctgtcccctcaccccagctgctcctagagaggcccttkttacctgtgtcattcatgtttctaacaagccaccctccaccccgtcttgtgtgccccatgcacctgtgcatctgtgctgtgtgggtgttggtggcccttttgcgcatgcatggggcatcccctgcccagaccagcgggacaaggagcgggaacggcggctgcaggaggcacggggccggccaggggaggggcgcggcaacacagccactgagaccaccacgaggcacagccagcgggcagctgatggctctgctgtcagcactgttaccaagactgagcggctcgtccactccaatgatggcacacggacggcccgcaccaccacagtggagtcgagtttcgtgaggcgctcggagaatggcagtggcagcaccatgatgcaaaccaagaccttctcctcttcctcctcatccaagaagatgggcagcatcttcgaccgcgargaccaggccagcccacgggccggcagcctggcggcgctcgagaaacggcaggccgagaagaagaaagagctgatgaaggcgcagagtctgcccaagacctcagcctcccaggcgcgcaaggccatgattgaraagctggagaaggagggcgcggccggcagccctggcggaccccgcgcagccgtgcagcgatccaccagcttcggggtccccaacgccaacagcatcaagcagatgctgctggactggtgtcgagccaagactcgcggctacgagcacgtcgacatccagaacttctcctccagctggagtgatgggatggccttctgtgccctggtgcacaacttcttccctgaggccttcgactatgggcagcttagccctcagaaccgacgccagaacttcgaggtggccttctcatctgcggagacccatgcggactgcccgcagctcctggatacagaggacatggtgcggcttcgagagcctgactggaagtgcgtgtacacgtacatccaggaattctaccgctgtctggtccagaaggggctggtaaaaaccaaaaagtcctaamccctgctcggggccccacggatgctggtggactgtgtgcccctggtggaggtggacgacatgatgatcatgggcaagaagcctgaccccaagtgtgtcttcacctatgtgcagtcgctctacaaccacctgcgacgccacgaactgcgcctgcgcggcaagaatgtctagcctgcccgcccgcatggccagccagtggcaagctgccgcccccactctccgggcaccgtctcctgcctgtgcgtccgcccaccgctgccctgtctgttgcgacaccctcccccccacatacacacgcagcgttttgataaattattggttttcaamraaaaaaaaaaaaaaaaaaaaaaaaaaaaaaaaaaaaaaaaaaaaaaaaaaaaaaaaaaaaaaaaaaaaaaaaaaag

SEQ ID NO: 127 - DNA, 1794 bp, Homo sapiens
  misc_feature (1675)..(1675): n equals a,t,g, or c
gctcctctagtgactgctggggtgctagttttcacggttaccacagaacttgagagaggaaaatgagaacggcaaattaaaatgccataaaattccattcttaacaagcgttagtttttttttcctatatatccactccctcacctatcttatgacatatgagaaatcctaacatgggacttggtgtataattagcattgaatgaatttaagttttctttctttctttcttttcttttatcttctgtggtctcctgcagaatcagtctataaaaagggcatggtaaaaaaaaatctatctcatagcattgttgaaaagattaaatgacataataagatgatgcatatatagtagctagcactgtacctgatgcatattaggagcttgataatattactaacattatcatcatcaatgctatctgagcaaagaggctgttccttctttccagccagagttcttctgttggataatatttccagctgtgaaccccaaccagagaccttgaagcctttatttccttttctctcattggcctttggctgaagtctcctttctgcagagaacaaagtgaccagcttttgatgaactattttcctcttttatccatttccaagtgttagccatagtgaagaagtgtagctgggtgctagcccaactcaagaagtgataatgtwatatccaacccaagataaactcaaggataactttcaacacggctactcaagcagttcaggggggaggcatcttgtagagaggagaccaggaagtcacttggcagctgggccagcacacagagggccattgctccagtaaagcagctaacctccatctcttcatcaaaccatcctagactcagcactctgcagagaaggagcagatggagggaatgtgtggagagattagataagaaggatttctaatctagtgggggagcgagtaaaatgtacagaagtttgagaagccaagctcttatgtammaatccrcccccatcactcaacaatccccactgtatgaataaagcctggaaagtttccaattaaaacagtgcttgtgaatattggcaaggggtatctttgtgtgcagggtacatttaaagggagaagggtgaagatacacccttgccttytaggagtacactttctgagagcttgttcaccaggctgtgagtttctcagtctatctgtttctcagtctgttagtaatgaatgtatctcccacttagcacagcagctagcacatagtagatgcctaacaaatgtgtgttaaattgaatgttggaagtctgtgtcctgaaagcttttcttcacatattacaaggctttttatttgttcaacacatttttaccaagtttttttctgtgttccaggtcttttgattagctgtttttaagtcacagaaatgggtgtcgggaacaaaaccagtcaaaagtcctcattctacatcatttacactttcccttcctatatttataagttttaatatcagcttctacaataggttccagaacaagtggtgctcaaggaatggagaaaatgactattccaaccctagctgtaggtgaaccaaaaaccccagagaaatcaaagtgtagtttaaagcagtgcttctcaagttgtaatgtgcatatagatcacctggggttgttattaaaatgcaaattctaaaagagncaggagaatatcttgagcctgggagccagaggttgcagtgagccgagatcattccactgcattccagcctgggtgacacagcgagactccatcttaaaaaaaaaaaaaaaaaactcgta

SEQ ID NO: 128 - DNA, 1346 bp, Homo sapiens
cgctggggccgcgattccgcacgtcccttacccgcttcactagtcccggcattcttcgctgttttcctaactcgcccgcttgactagcgccctggaacagccatttgggtcgtggagtgcgagcacggccggccaatcgccgagtcagagggccaggaggggcgcggccattcgccgcccggcccctgctccgtggctggttttctccgcgggcgcctcgggcggaacctggagataatgggcagcacctgggggagccctggctgggtgcggctcgctctttgcctgacgggcttagtgctctcgctctacgcgctgcacgtgaaggcggcgcgcgcccgggaccgggattaccgcgcgctctgcgacgtgggcaccgccatcagctgttcgcgcgtcttctcctccaggtggggcaggggtttcgggctggtggagcatgtgctgggacaggacagcatcctcaatcaatccaacagcatattcggttgcatcttctacacactacagctattgttaggttgcctgcggacacgctgggcctctgtcctgatgctgctgagctccctggtgtctctcgctggttctgtctacctggcctggatcctgttcttcgtgctctatgatttctgcattgtttgtatcaccacctatgctatcaacgtgagcctgatgtggctcagtttccggaaggtccaagaaccccagggcaaggctaagaggcactgagccctcaacccaagccaggctgacctcatctgctttgctttggcatgtgagccttgcctaagggggcatatctgggtccctagaaggccctagatgtggggcttctagattaccccctcctcctgccatacccacacatgacaatggaccaaatgtgccacacgctcgctcttttttacacccagtgcctctgactctgtccccatgggctggtctccaaagctctttccattgcccagggagggaaggttctgagcaataaagtttcttagatcaatcagccaagtctgaaccatgtgtctgccatggactgtggtgctgggcctccctcggtgttgccttctctggagctgggaagggtgagtcagagggagagtggagggcctgctgggaagggtggttatgggtagtctcatctccagtgtgtggagtcagcaaggcctggggcaccattggcccccacccccaggaaacaggctggcagctcgctcctgctgcccacaggagccaggcctactctactgggaaggctgagcacacacctggaagggcaggctgcccttctggatatgtaaatgcttgctgggaagatcttacttgagtttaactttaacccc

SEQ ID NO: 129 - DNA, 1262 bp, Homo sapiens
cctaatggcccgasctgaatacttgaaggagctcaagatgagggaatctcgctgggaagctgacaccctggacaaagagggactgtcggaatctgttcgtagctcttgcacccttcagtgaccctagaagaatgattggacagatgtgagccatctggagcagaggggcactaacccaggctgacgccaagaatgaagtggcccactgcagccctggcgagcaggcttcttggatggacagtgctgagacccccatatcccagagtccccagcctccctcaggttactctgcaccccacagatggtttgatggctgtgctgtatactggaggggagggcaggactctgggagaacagcacttctttcatgagacctttgttactcggtggttactgggtcctgtgcctgtccgttttggggcatgcagccctctatcatttttggctccgagaagagggcaaggggcccccgcaggtarcttctgtgcttgccctcgccctgccagcaggcagctgtgcccctggcctgcccttcccgggaccccttattccaactcagctcctctttgcactggaatggggcactccaacacccctcagggaccaccctccccacagtatgcactcagccccacagaacccaccagtctttctgggaactcacacctgcccgccatcttggtactttaggttaatccctcaagcatgaaagctggatcttttggggtttaagaagcccaagccttgttcctgccctggcctagggagcactcaggagggttccttggtcctcatctctcccacctccgttccctctgggccccacactagccacagcgcgggccttgtgctggagtttgagcctgggacagggagagggaggcttggagacagtctgacccagtgccctctaggccacccacttctaggcctgccctgccgccgtggagccctgggcaagctctttcccctttctgggcctgggtctccccatctcttcaatggggctgataccttcacagcccacagcatgggcacttatgaggacaaagtgaatttaacctggaaaagaatgtatttgagagtttcttttaaataatcagcgggtgttggtgatttgtagcccttctgcccttaaatgcttccttgggcaagagctgtctgtcctccctgcaggaggctgagtgtgaagagtatcattcattgtttctctattaaattattttctgctaaaaaaaaaaaaaaaaaatttctgcggtccg

SEQ ID NO: 130 - DNA, 2572 bp, Homo sapiens
  misc_feature (2527)..(2527): n equals a,t,g, or c
aattcggcacgagtctggaccttcttagmttgcttgatatcaggttgtttttgtagccattttgcttcacagtcacctggaatgccgggagcccctgctcatcccgatcctctccttgtacatgggcgcacttgtgcgctgcaccaccctgtgcctgggctactacaagaacattcacgacatcatccctgacagaagtggcccggagctggggggagatgcaacaataagaaagatgctgagcttctggtggcctttggctctaattctggccacacagagaatcagtcggcctattgtcaacctctttgtttcccgggaccttggtggcagttctgcagccacagaggcagtggcgattttgacagccacataccctgtggtcacatgccatacggctggttgacggaaatccgtgctgtgtatcctgctttcgacaagaataaccccagcaacaaactggtgagcacgagcaacacagtcacggcagcccacatcaagaagttcaccttcgtctgcatggctctgtcactcacgctctgtttcgtgatgttttggacacccaacgtgtctgagaaaatcttgatagacatcatcggagtggactttgcctttgcagaactctgtgttgttcctttgcggatcttctccttcttcccagttccagtcacagtgagggcgcatctcaccgggtggctgatgacactgaagaaaaccttcgtccttgcccccagctctgtgctgcggatcatcgtcctcatcgccagcctcgtggtcctaccctacctgggggtgcacggtgcgaccctgggcgtgggctccctcctggcgggctttgtgggagaatccaccatggtcgccatcgctgcgtgctatgtctaccggaagcagaaaaagaagatggagaatgagtcggccacggagggggaagactctgccatgacagacatgcctccgacagaggaggtgacagacatcgtggaaatgagagaggagaatgaataaggcacgggacgccatgggcactgcagggacagtcagtcaggatgacacttcggcatcatctcttccctctcccatcgtattttgttcccttttttttgttttgttttggtaatgaaagaggccttgatttaaaggtttcgtgtcaattctctagcatactgggtatgctcacactgacggggggacctagtgaatggtctttactgttgctatgtaaaaacaaacgaaacaactgacttcatacccctgcctcacgaaaacccaaaagacacagctgcctcacggttgacgttgtgtcctcctcccctggacaatctcctcttggaaccaaaggactgcagctgtgccatcgcgcctcggtcaccctgcacagcaggccacagactctcctgtcccccttcatcgctcttaagaatcaacaggttaaaactcggcttcctttgatttgcttcccagtcacatggccgtacaaagagatggagccccggtggcctcttaaatttcccttccgccacggagttcgaaaccatctactccacacatgcaggaggcgggtggcacgctgcagcccggagtccccgttcacactgaggaacggagacctgtgaccacagcaggctgacagatggacagaatctcccgtagaaaggtttggtttgaaatgccccgggggcagcaaactgacatggttgaatgatagcatttcactctgcgttctcctagatctgagcaagctgtcagttctcacccccaccgtgtatatacatgagctaacttttttaaattgtcacaaaagcgcatctccagattccagaccctgccgcatgacttttcctgaaggcttgcttttccctcgcctttcctgaaggtcgcattagagcgagtcacatggagcatcctaactttgcattttagtttttacagtgaactgaagctttaagtctcatccagcattctaatgccaggttgctgtagggtaacttttgaagtagatatattacctggttctgctatccttagtcataactctgcggtacaggtaattgagaatgtactacggtacttccctcccacaccatacgataaagcaagacattttataacgataccagagtcactatgtggtcctccctgaaataacgcattcgaaatccatgcagtgcagtatatttttctaagttttggaaagcaggttttttcctttaaaaaaattatagacacggttcactaaattgatttagtcagaattcctagactgaaagaacctaaacaaaaaaatattttaaagatataaatatatgctgtatatgttatgtaatttattttaggctataatacatttcctattttcgcattttcaataaaatgtctctaatacaatacggtgattgcttgtgtgctcaacatacctgcagttgaaacgtattgtatcaatgaacattgtaccttattggcagcagttttataaagtccgtcatttgcatttgaatgtaaggctcagtaaatgacagaactatttttncattatgggtaactgggggaataaatggggtcactgggagtaggg

SEQ ID NO: 131 - DNA, 1488 bp, Homo sapiens
cgccaagtttccggagggagagggtagaaactggagggggtggacctgtcactcacgggactgagggtccttttctcccgctcccaggaggaacgagaatgaatatgactcaagcccgggttctggtggctgcagtggtggggttggtggctgtcctgctctacgcctccatccacaagattgaggagggccatctggctgtgtactacaggggaggagctttactaactagccccagtggaccaggctatcatatcatgttgcctttcattactacgttcagatctgtgcagacaacactacaaactgatgaagttaaaaatgtgccttgtggaacaagtggtggggtcatgatctatattgaccgaatagaagtggttaatatgttggctccttatgcagtgtttgatatcgtgaggaactatactgcagattatgacaagaccttaatcttcaataaaatccaccatgagctgaaccagttctgcagtgcccacacacttcaggaagtttacattgaattgtttgatcaaatagatgaaaacctgaagcaagctctgcagaaagacttaaacctcatggccccaggtctcactatacaggctgtgcgtgttacaaaacccaaaatcccagaagccataagaagaaattttgagttaatggaggctgagaagacaaaactccttatagctgcacagaaacaaaaggttgtggaaaaagaagctgagacagagaggaaaaaggcagttatagaagcagagaagattgcacaagtggcaaaaattcggtttcagcagaaagtgatggaaaaagaaactgaaaagcgcatttctgaaatcgaagatgctgcattcctggcccgagagaaagcgaaagcagatgctgaatattatgctgcacacaaatatgccacctcaaacaagcacaagttgaccccggaatatctggagctcaaaaagtaccaggccattgcttctaacagtaagatctattttggcagcaacatccctaacatgttcgtggactcctcatgtgctttgaaatattcagatattaggactggaagagaaagctcactcccctctaaggaggctcttgaaccctctggagagaacgtcatccaaaacaaagagagcacaggttgatgcaagaggtggaaatgttctccatatcaagatgtggcccaaggggttaagtgggaacaatcattatacggactcttcagatttacagagaacttacacttcatctgttccacctctcctgcgatagtcctgggtgctccactgattggaggatagagccagctgtctgacacacaaatggtcttttcagccacagtcttatcaagtatcctatatgtattcctttctaaactgctactcatgaatgaggaaagtctgatgctaagatactgcctgcactggaatgttaaacactaaatatataacaagctgtgttttcctaagctgaaaaaaaaaaaaaaaa

SEQ ID NO: 132 - DNA, 704 bp, Homo sapiens
  misc_feature (287)..(287): n equals a,t,g, or c
actgtgtctgtcttgtctctgatatttatatgccattatgtggcctctactgccttaggattctaatgttcccactaagatcagctaactcagttccactacagtgtttaccaccatcatctctcgcaaacaaagacagccacttcagagctcctaggaaatagtggtgctcccatcatcattgcattccttaatsacatggtgaaaattaacaatggctaaggagcctttgtgttttctcctctacaatatgcccaggaatttctggcattttggccatcttattnataggctattactgaatttmagcctmatcctmccaaattattaatgccaaaatattaactcttgattcttaggtgagtgcacccatgccaataaatttgccatgatctaaccttaaatgtattctcatatatgctgtccaagtttctrctgattaaaatggcaaggcctttagttctcctacataggttttctctctccagagaaggcctcaattctctgactaggctatgttgggatataactggaggcactaataggtagtagggtaaattctttattttattatttttggagacagggagggtcttgctttgttcagactggagtgcagtggtgtgatcatggctcattgcaactttgaactcctgggcgacagagcaagactccatctcaaaaaaaaaaaaaaaaaaactcga

SEQ ID NO: 133 - DNA, 1022 bp, Homo sapiens
ttcccgggtcgacccacgcgtccgcccacgcgtccggcttggggccagcaccctgtctcaaagatggcaaaatgaggctagttctggatgagctagctggtgtgggttccaaccataggaacacactgatgctcaaatcctaaggtgccaagctctaggccctggaggctggtagaacaggatctatgcctggaatcctggcagggattcctgtcaaggacttgtgtttaagcctgcttcagggcttcaggctgcttctgctctgtgtctgcccaggctggctgagcgggtggatgggtggacagaagggctcaccaaggattgtggacatagggtaggccctggtaccacgggtttcaggctgttatcacttcccttgtaggaacatagccagaagcagatgagccagggtagagggctggcccctcctctcatcttcccttcagtcttaaattgtctccagcgatgggaagaggccagggactgtaacccttgtgctgtgtattctctgagcctctgctcactctcagggccaagcagctcccaagccggggccctctcttggccaaaatctgaggagcagtctaggttacaggctttttggtaggtaggttctggctgcctgttaatgcagttaggccccctgattaggtacagtgagaaacaagctagaacaaccctggcccagaagactgtgcactccagcaagatccagggatgatagccttgcagggccactgggagtttgtgcccaagcttctccctcttctctccccagggggcactgggactggtccctgccctcatccttagcctgggccttccccagaggtattaaagagaagtatgattcctctgtcttcagttcttttcaggggcatcctgcccatagtacccagttcccaaggggcccccagtcacgtggtgaagcctagcactcatgcagctcttagggaaccaaaaaccagcactgaaataaagctgaatgactgactgaaaaaaaaaaaaaaaaagggcggccg

SEQ ID NO: 134 - DNA, 1766 bp, Homo sapiens
  misc_feature (14)..(14): n equals a,t,g, or c
  misc_feature (36)..(36): n equals a,t,g, or c
  misc_feature (1750)..(1750): n equals a,t,g, or c
acgggggctttaangggaaacccttcccggaatttncgggtcgacccacgcgtccggttttgtttatggagggtccagtaagtgcaaacaaccattgcctggtcctaagggttcagagtccccgaattccttcttggaccaggaaagccggagacgaagattcaccattgcagactcggatcagttgcctgggtactcggtggaaaccaacattctgcccacaaaaatgagagagaaaacaccatcttatggcaagccacggcctttgtccatgcctgctgatgggaactggatggggattgtggacccttttgccagacctcgaggtcatggcaggaaaggggaggatgccctttgccggtatttcagtaacgagcggattcctccgatcattgaagagagctcctctcccccataccggttctccagacccacgaccgagcggcatctggtccggggtgcggactacatccgaggaagcaggtgctacatcaactcagatctccacagcagcgccacgattccattccaggaggaagggaccaaaaagaaatctggctcctcagctacgagtcctcgtccacagaaccgtccctcctggtcagctggtttacgcgcctcaaactgttgactcactgagagggaccctgctcaggccacctgcctggctcctgscccaagtgccttgcttttacagtggacagcctcttctcgtttcagcctcagtattatgtagggaccttatgcaatttctttttcttttgaaaagttatctactgcccttcttggaagtttgcaggattggatgggaacaaattcagaggatcttaggtgctggcttgtggagacaaaaggagggaaatgggtagagcctgtttgtcttgcttccccagagatagaatgtgaagacacgcgctagaaatcgcagtcctggccagagacgttatggtcattgtgagggactggtggcattgttcctttttgaggggctggggggactcaaattggtggctgttttcacacagatgtgttggtttgtggtccaacttctttatctgaaaaagccagtgagaaaacatttttgatttgatttttctaaactatctaccatattttaagtgtagcagctttgactttgcaataacgtggcaagtatctgatttctcctttgaggcagaggtttaagtgtaggcctgttacacttgtttgatacctttttcatgacagtctcagtatagatcagttggtacagaaatacatgaacacattttgatagggcttatttcacacaaagaagtttatggttatttgtgtggggtggtgttgttatatattattgtctttaagggaaaagaagctataagattcgctgacagccaaagtatcatttagaaaagtgaagcaacaagatttaggttgatgaaagatacatgagtttgcattttgacctgttcagtgtctgtcttccagcacggtgtgtacacttcttcaaaattgtacacagtttgctaattagaaatatcttggaaagcctcatggtcactaattttcaactagcatcaggtattttgaaaacgtgtgtctggatattaactcttgtttaaactgaatgtatgatattttgttagaatggaaaagtactatcttgttaatttaagtattttaaatatagttgtatatttttcttaaaaaaaaaaaaaaaaaaaaaaaaaagggcggccgctctagaggatcccgcgaggggccccanattacgcgtgagcgtt

SEQ ID NO: 135 - DNA, 989 bp, Homo sapiens
ggcacgagcatgccagtgcctactctgtgcctgctgtgggccctggcaatggtgacccggcctgcctcagcggcccccatgggcggcccagaactggcacagcatgaggagctgaccctgctcttccacgggaccctgcagctgggccaggccctcaacggtgtgtacaggaccacggagggacggctgacaaaggccaggaacagcctgggtctctatggccgcacaatagaactcctggggcaggaggtcagccggggccgggatgcagcccaggaacttcgggcaagcctgttggagactcagatggaggaggatattctgcagctgcaggcagaggccacagctgaggtgctgggggaggtggcccaggcacagaaggtgctacgggacagcgtgcagcggctagaagtccagctgaggagcgcctggctgggccctgcctaccgagaatttgaggtcttaaaggctcacgctgacaagcagagccacatcctatgggccctcacaggccacgtgcagcggcagaggcgggagatggtggcacagcagcatcggctgcgacagatccaggagaggtgagcctggcaggggtttggcaggcagggcagttggatggggggcgcacagggcagctggaaaggggccccctcacctgggctgagccacatctccctccccagactccacacagcggcgctcccagcctgaatctgcctggatggaactgaggaccaatcatgctgcaaggaacacttccacgccccgtgaggcccctgtgcagggaggagctgcctgttcactgggatcagccagggcgccgggccccacttctgagcacagagcagagacagacgcaggcggggacaaaggcagaggatgtagccccattggggaggggtggaggaaggacatgtaccctttcatgcctacacacccctcattaaagcagagtcgtggcatctcaaaaaaaaaaaaaaaaaaaaaaa

SEQ ID NO: 136 - DNA, 2286 bp, Homo sapiens
  misc_feature (2262)..(2262): n equals a,t,g, or c
  misc_feature (2264)..(2264): n equals a,t,g, or c
  misc_feature (2272)..(2272): n equals a,t,g, or c
  misc_feature (2278)..(2279): n equals a,t,g, or c
gctgatgtcgaggttcatcctgaaccacctggtgctggccattccactgagggtgctggtggttctgtgggccttcgtcttgggcctatccagggtcatgctggggcggcacaatgtcaccgacgtagcttttggcttttttctgggctacatgcagtacagcatcgtggactattgctggctctcaccccataatgctccggtcctctttttactgtggagtcaacgatgacaccatctcattgattatggcaccaggaagtctgaaggtttccacattcgatgatgtcaacctaaaccagcagccatcccgcttgtccctcttaggcatttcaggcttcctttgggatttcaggtgtcccatgatcttgatgtgctgctaggctggagcacacactggccattactgaacacagccatattagggaaagcaaaaaaacccaaaaaatcctctattgtatatttattcaacaactgtttatgtttccaggacaactgcaaagaaaacaagctgaggtggttatactgttgctgttaaaagttggtatcagtaagatttgtgttttgtgataatccctaaatcaacataccacttgtaaactgaacttcgagaaagaaacatgatgttcattctgtaaatatacatgcagacaggtcatgtactaatcctagtccttttcctgaggtagattttaaacagtatttttaaagtccaagacataggtttttctagtttattccctgaagatctgttgccacagttgggagatttcttcttaatcctgattttcttggtaagcttttttactttattatctctataatttattatctctatccatatttgtggatcgggtagtgggaaaagagattataatacttgtctttctctcctctccctccatccctcaaaagatctttatgcatttcccactactcccttactgtcttttagcattcagagaaaaagccaacttgcttaaagaggaatcacttaaaaggtaggcatatctaagatgctcatagaagaggaagaatgggacatggccccatgcttatttttgtttacaacgtaacatggcatgagagagggcagagaaactaagttgctggggaaagttagaggaactgaaagtttgggaataggctgaccacatattatgccagtgaccagtatgacaggagatggggccctgctgccagtcatctccactgaataaagaataatgctcctctttcagggtaataaagtggggaaaaggaacgtcttctcaatgcaagaacataagctttctcgtatatacctgtatgctacagtttttcacatggaattccgttttctgaggtacagcacattttaggtaacagtatttaacttgaaattcatcatgggagtctgctgctataccaggcacaagataaaactccaaaatttctgtttacattgacctttacatttaaagctgttcatccatggtgcctccccaaatcataagaccaaagaccaccaaacgcagggtggactctgctcattattctttgacccagaaagactggagaaggtatgtgctttaagtgctgctctacctgaaaagaaatcctttaaattacctatggaagtgatgtcctcagataatcttaatgactattttggcatttataaatagaaatgattatggactttgatctgccatacggaggttcggaacctggagaayggctgtgataagtaggttttgattgagtgaaagcatgagcttgttcagagtgaggggcatagtgaaaaaggaacagccatgcctcawaatcaaatcatttgcrttcccacagcatcctgaataccgactacctcttcacttgctaaagcagctaaactgtgaagctctaagtggtttgggtttgttgtttaaccttagcgagatcctttaactgcagcaatattcaagccagatatttggaagcaaatgatatttcctcttgcagtgtccacaaatctgaatattaggggcatgaaattaggcttaccatctgatttgtaattacaattttggaattctctgttttagttgctgaggcctgagttttctggctcttaaagcatagatcatttcacctgatgtttttgaagcatcctaagtacagtagagtagaaaactgatttctttgttaattgtacactgaataatgccttttaaaaatcaaaataaaattaacaaataatggtgaaaaaaaaaaaaaaaaaaaaaaactcgagggggggcncnaaaacaantcgacnnatagtga

SEQ ID NO: 137 - DNA, 1240 bp, Homo sapiens
  misc_feature (1225)..(1225): n equals a,t,g, or c
gtgaaacgcctgggctcaagctgattcacctgcctccacctcccacagtgctgggattacaaacatgatcccccacgcccagccaacacaaaacttctgatgctctgttttctcatctgtgaactggagctaaggctaagtggtctgtctgtttaataagagtttgaatcagatggcctggcatgaagagtcactggcctgagagaatgtcaggggcatttgtaaatgtgtaaagggctgaaaaatcctgagggattattattattgctattgttgttattattcacagacacatccaacagccattgtctgcctccttatctgtcatgctttctgcacgagcgtcagcctgagcttcaatctgtgtgtatatctgcagcttacgtccttgccacccctccagaacccagtttcatccttgtaggtttttccgaagcaggatttgcacaagtggcgtgttttcttaagtatttattttgcaggccatttactcggcatggctatttttacagtgggtaaggagcaaggctaaaaataacttagctcataaccagacaggttctgcatttgacatttacgtggaattcatttgcatctcatttgttcgcctttctgtttaacaggtagaatgtaagaaagctcagccgaaagaagtcatgttcccacctgggacaagaggccgggcccggggactgccttacaccatggacgcgttcatgcttggcatggggatgctgggtgagtctggacaggaccgcaggtcaccatggactgggagggctatggaggcctctactcccaactgggtcacctaccagtggggcaaactgcttcacctttctaagcctcagtttccttgtctgtagatgaggatgataattccccgttccaagacagttgtgatgattaagtgtgggtgtgtgtgtgtgcatgcatgtgtgtgtgtgtgtgtgtgtttgtatttataatattgccccatgcctggcttataggatatgttagactattttctctcttttccatctccttcctcaaaagaaggaaaagtccccctctattgcctcagccctctcatctgagtgggagttcttaagatgtaaggactcctggctgacttgacttgtgtgggctaaggctacgttttctaaaactkgggagaggagggaagtggtaagggtgggcgataatcctgtctatttaaatgattaacatttttctcttgggntatcaaaatttgcat

SEQ ID NO: 138 - DNA, 997 bp, Homo sapiens
  misc_feature (963)..(963): n equals a,t,g, or c
cccgactctaggccggaagcgcgcggagaccatgtagtgagaccctcgcgaggtctgagagtcactggagctaccagaagcatcatggggccctggggagagccagagctcctggtgtggcgccccgaggcggtagcttcagagcctccagtgcctgtggggctggaggtgaagttgggggccctggtgctgctgctggtgctcaccctcctctgcagcctggtgcccatctgtgtgctgcgccggccaggagctaaccatgaaggctcagcttcccgccagaaagccctgagcctagtaagctgtttcgcggggggcgtctttttggccacttgtctcctggacctgctgcctgactacctggctgccatagatgaggccctggcagccttgcacgtgacgctccagttcccactgcaagagttcatcctggccatgggcttcttcctggtcctggtgatggagcagatcacactggcttacaaggagcagtcagggccgtcacctctggaggaaacaagggctctgctgggaacagtgaatggtgggccgcagcattggcatgatgggccaggggtcccacaggcgagtggagccccagcaaccccctcagccttgcgtgcctgtgtactggtgttctccctggccctccactccgtgttcgaggggctggcggtagggctgcagcgagaccgggctcgggccatggagctgtgcctggctttgctgctccacaagggcatcctggctgtcagcctgtccctgcggctgttgcagagccaccttagggcacaggtggtggctggctgtgggatcctcttctcatgcatgacacctctaggcatcgggctgggtgcagctctggcagagtcggcaggacctctgcaccagctggcccagtctgtgctagagggcatggcagctggcacctttytytatatcacctttytggaaatcctgctntttcatcccaaatttaagggggtttcaagaagaa

SEQ ID NO: 139 - DNA, 2383 bp, Homo sapiens
  misc_feature (538)..(538): n equals a,t,g, or c
gagcccacgagaggcagcgccatggcggagcagacctactcgtgggcctattccctggtggattccagtcaagtgtctacatttctgatttccattcttcttatagtctatggtagtttyaggtcccttaatatggactttgaaaatcaagataaggagaaagacagtaatagttcttctgggtctttcaatggcaacagcaccaataatagcatccaaacaattgactctacccaggctctgttccttccaattggagcatctgtctctcttttagtaatgttcttcttctttgactcagttcaagtagtttttacaatatgtacagcagttcttgcaacgatagcttttgcttttcttctcctcccgatgtgccagtatttaacaagaccctgctcacctcagaacaagatttcctttggttgctgtggacgtttcactgctgctgagttgctgtcattctctctgtctgtcatgctcgtcctcatctgggttctcactggccattggcttctcatggatgcactggccatgggcntctgtgtcgccatgatcgcctttgtccgcctgccgagcctcaaggtctcctgcctgcttctctcagggcttctcatctatgatgtcttttgggtatttttctcagcctacatcttcaatagcaacgtcatggtgaaggtggccactcagccggctgacaatccccttgacgttctatcccggaagctccacctggggcccaatgttgggcgtgatgttcctcgcctgtctctgcctggaaaactggtcttcccaagctccactggcagccacttctccatgttgggcatcggagacatcgttatgcctggtctcctactatgctttgtccttcgctatgacaactacaaaaagcaagccagtggggactcctgtggggcccctggacctgccaacatctccgggcgcatgcagaaggtctcctactttcactgcaccctcatcggatactttgtaggcctgctcactgctactgtggcgtctcgcattcaccgggccgcccagcccgcccttctctatttggtgccatttactttattgccactcctcacgatggcctatttaaagggcgacctccggcggatgtggtctgagcctttccactccaagtccagcagctcccgattcctggaagtatgatggatcacgtggaaagtgaccagatggccgtcatagtccttttctctcaactcatggtttgtttcctcttagagctggcctggtactcagaaatgtacctgtgtttaaggaactgccgtgtgactggatttggcatttaaagggagctcgtttgcaggagagaggtgctggagccctgtttggttccttctcttcctgcggatgtagaggtggggccccttccaagagggacaggcctctccccagcgcgccttcctcccacgtttttatggatctgcaccagactgttaccttctgggggagatggagatttgactgtttaaaaactgaaaacagcgaggagtctttctagaacttttgaacactaaaaggatgaaaaaaattagcaaaccgaagtttcttcaatgacccctcgagaactttgggaccagtttcctatrggggactcagtttcagagaactgagacagaagctcttctgtcgttatattcttctttcctttttttggatttattaaatattttctgtggtgtgaagtgacttattaaatccacagacattgagtgacttcttacaacatccacataagratttgttgtaatgagttcatgtccacccagatgttgtgttggcagtgaacaagggcacggtttttatacatacgtacatatatatatataaacacacacatagatatatatgaataaacaaaaatgaaatcctgctaagatcacgctgtgtagctgacaggggcttgctgtcgttttgagcatgtcgagcagtttactgtggcttccttgtatatggataagctgctgtccttccccttcacaactgaccccgcagttacaaactagtatagcatttgtgctgattgatgatagactcatggacttcaggagcccttacttggttttgatcagtgtagcaaattagggatgaagagttcaaaccttttggccctttctttcttttctaggcttctccctcgcagggtgttccgtagtttcttctcgagccaatgcatgtattatagcagcaggtgtctttgtgctttctcatcatagtaacgtactacttgtaaatacatttttctattttctatttttttgtatttttttttgacattttgtttcattggtgtgctgtatattttccatgccctcactcctttaagaaaaaaaaaaaaaaaggaaaaaagcaacac

SEQ ID NO: 140 - DNA, 2081 bp, Homo sapiens
  misc_feature (538)..(538): n equals a,t,g, or c
gggttctcaatggaaaaatattggtagacatcagcaacaacctcaaaatcaatcaatatccagaatctaatgcagagtaccttgctcatttggtgccaggagcccacgtggtaaaagcatttaacaccatctcagcctgggctctccagtcaggagcactggatgcaagtcggcaggtgtttgtgtgtggaaatgacagcaaagccaagcaaagagtgatggatattgttcgtaatcttggacttactccaatggatcaaggatcactcatggcagccaaagaaattgaaaagtaccccctgcagctatttccaatgtggaggttccccttctatttgtctgctgtgctgtgtgtcttcttgtttttctattgtgttataagagacgtaatctacccttatgtttatgaaaagaaagataatacatttcgtatggctatttccattccaaatcgtatctttccaataacagcacttacactgcttgctttggtttactccctggtgttattgctgccattctacaactgtaccgaggncacaaaataccgtcgattcccagactggcttgaccactggatgctttgccgaaagcagcttggcttggtagctctgggatttgccttccttcawgtcctctmcmcacttgtgattcctattcgatattatgtacgatgragattgggaaacttaaccgttacccagscaatactcaagaaggagaatccatttagcacytcytcagcctggctcagtgattcatatgtggctttgggaatacttgggttttttctgtttgtactcttgggaatcacttctttgccatctgttagcaatgcagtcaactggagagagttccgatttgtccagtccaaactgggttatttgaccctgatcttgtgtacagcccacaccctggtgtacggtgggaagagattcctcagcccttcaaatctcagatggtatcttcctgcagcctacgtgttagggcttatcattccttgcactgtgctggtgatcaagtttgtcctaatcatgccatgtgtagacaacacccttacaaggatccgcagggctgggaaaggaactcaaaacactagaaaaagcattgaatggaaaatcaatatttaaaacaaagttcaatttagctggatttctgaactatggttttgaatgtttaaagaagaatgatgggtacagttaggaaagtttttttcttacaccgtgactgagggaaacattgcttgtctttgagaaattgactgacatactggaagagaacaccattttatctcaggttagtgaagaatcagtgcaggtccctgactcttattttcccagaggccatggagctgagattgagactagccttgtggtttcacactaaagagtttccttgttatgggcaacatgcatgacctaatgtcttgcaaaatccaatagaagtattgcagcttccttctctggctcaagggctgagttaagtgaaaggaaaaacagcacaatggtgaccactgataaaggctttattaggtatatctgaggaagtgggtcacatgaaatgtaaaaagggaatgaggtttttgttgttttttggaagtaaaggcaaacataaatattaccatgatgaattctagtgaaatgaccccttgactttgcttttcttaatacagatatttactgagaggaactatttttataacacaagaaaaatttacaattgattaaaagtatccatgtcttggatacatacgtatctatagagctggcatgtaattcttcctctataaagaataggtataggaaagactgaataaaaatggagggatatccccttggatttcacttgcattgtgcaataagcaaagaagggttgataaaagttcttgatcaaaaagttcaaagaaaccagaattttagacagcaagctaaataaatattgtaaaattgcactatattaggttaagtattatttaggtattataatatgctttgtaaattttatattccaaatattgctcaatatttttcatctattaaattaatttctagtgtaaaaaaaaaaaaaaaaagggcggccgc

SEQ ID NO: 141 - DNA, 646 bp, Homo sapiens
tcgacccacgcgtccgataactttttcaagcaatatcagtgagtgggtcccatcgacagggttccaggacctggaacactttaacagaaggaaatgccgaagcagcttgcacagttgctttacagacttccaagaggctgattctggcttcaagatggagccttggagttggttttttttttttttttttttcttccctcaaagaacctgcggttgcgctttgtgtgttttgtttttgttttccatttgggggccccatgggaaagagcttctgaactctttcctttatgaactcccactgtgttcctataaaggcccttttctttcttagtgttgtaagttacattttcattatgccccatcacatcttctttactgtaaaaatattaaaaagctgtttccaagtgggacagctaatgaagctctaattattgcagacatatttttgagatgtaaaaaaaaaaatttaaagttaaatgataagtcttagaggcgagtgaggaataaaatggatgtaaacatttacatgggatgcattagaattctgctgtgtgtactgtcttttggttgaaacaaattatgaacagtgactaataataaaaagtcaatacccaawraaaaaaaaaaaaaaaaaaaaagggcggcc

SEQ ID NO: 142 - DNA, 312 bp, Homo sapiens
aattcccgggtcgacccacgcgtccgtgatgagtggatttgtactcttacccaggtcctgagggccagcccacccagcatccccacccctgatgacgctgtccctacaactggctgaactggtgcattttgtgtgtgccttccagagccagtggactggtgtgtatccaatgatgccacctctgaaacctacagaaccactatgctttgcatgtgtaccctgcagggtctgagggccaggctgtctggtagctctgctcctgggtgacagagcaagactctgtctcaaaaaaaaaaaaaaagggcggccgct

SEQ ID NO: 143 - DNA, 770 bp, Homo sapiens
  misc_feature (770)..(770): n equals a,t,g, or c
atgtgctgggctcaggaaaagttcaacccatcaataggttatcacatatatatactctgggactgattggaccacattttctcactgaattgactgattgatgaattcagttggcagaattaactcttctatgtctacatgaagtgccatttagaaataatcaactcttaatcagcctgggatagtcagtactaaaagcaccttcatgagctgtgaaaaatttaatgcatttatttacatatttagttttaaattttagtatattgttagttgaggtatagtttccaaacaaagagccgtgaaatgtttagtaactgtctctgtacctctggatgaggacagctcagccgggaatggagggggactgggtgaggagaccagaatgtcagtgtggccacgcagcacacttttgttttgtcttctgtccttgagcactggcttgttcctggataaactaggcataataatacctatcctgctgtgtgggtggaaggttaaatgtgataatgatgtgtgtgagatgcctgcacagtgcctggaggtattgaagaattatttgctgccttttctttttctacctaccacttacccgctacccccgggtgctacatgttagaaaacactgtgtaaagtgtggatgcttctgaaaaatctccctgccagcagttagtgccaatagcgtgcagaaaataagatgcaatgatttggcttcttttctgtttggcaataagaagcttatttgcacatagcctgatttctttcaatctgcn

SEQ ID NO: 144 - DNA, 1276 bp, Homo sapiens
tcgacccacgcgtccgcccacgcgtccgcttaatatctgtattcccagttgcctacgggataaaagcccaaactccttagcagagaatataaggccctagctcccacattatttcagcagtcatcacccactatgttcctcaagactgcagccattaactttttagagttccctaaacatgctgtttactttcatgcctctatcccgttgtctgtggaatgacttccctccttgcccttttcagtgctacaaacccctattctttaagacatagtacaaatggcatctcctggttggcatctttcctgcaggcctacaggcctagtaagtatcttcctcctctgtgctcctgcatacctccattcctttgttatgacatctataactttaataagtactaaaatctgtagtcctacaaaactcaggcatagaactcatttcctttatggytctataatggaactttacccaactctcacgttccccatgaccacagatgtggaaaatttgaatcttgacagttcaaggtgaactcagtcattttcagagttttcatagtcccttcaagattgaaactcagttcctgcaatgtttgccccttttctcctcttttgtctatgctgggagaggcattgtggggagggttgtctggcttatggctcccattgtcctctgcttgataaaccacctgagctttggtcattagcagtctcctgtgcctttcacactcaggtagtgtctgcacaggccactctatgtcttttccatgctgaagaaattcctttccaggccatgtctgtgttcctcctgccacacaggaaatttttgagcatgttcatcctccaagctgaatgcagggtcttgggtagtggtcctcacctgctccagagacttctccagccattgccactctccactcaggtgatgaagctggatgagggactgcacccaccagagtcaggccagggtcctgtctgctctgtgagtccctccaattgttcttattccgagatttccattgttctgccccctcttgactcccagggctctcaagggagtgggggtagtgaagggagccctttcccaagctcccccaagagctctagtcacatcacttctgatacttcttttcccaccagctggaagaaagaactttcatttgtcttgaaatgagaaaaatgttcttagaatattttgtattactctctgctctgtcatttatggtaaacaaaataaaataataaaaaaaaaaaaaaaaaaaaaaaaaagggcggcc

SEQ ID NO: 145 - DNA, 1223 bp, Homo sapiens
gctgctccgtttttcccccatctttgtggttttatctacctttggtctttgatgatggtgatgtacagatggggttttggtgtggatgtcctttctgtttgttagttttccttctaacagtcaggacccgcagcttcargtctgttggagtttgctggaggtccactccagaccctctttgcctgggtatcagcagcagaagctgcagaacagcggatattggtgaacagcagatgttgctgcctgatcgttcctctggaagttttgtctcggagtacccagccatgtgaggtgtcagtctacccctactgggggatgcctcccagttaggctacttgggagtcagggacgcacttgaggaggcactctgtctgttctcagatgtccagctgtgtgctggtagaaccagtgctctyttcaaggctktcagacagggacgtttaagtctgcagaggattctgctgccttttgtttggctgtgccctgccccccagaggtggagtctacagaggcaggcaggcctccttgaattgcggtgggctccaccgagttcgagtttcctggccgctttgtttaccccctcaagcctcggcaatggtgggcgcccctcccccagcctcactgccgscttgcagtttgatctcagactgctgtgctagcaatgaktraggctctgtgggtgtagraccctctgagccaggcatgggatataatctcctggtgtgcgatttgctaagacccattggaaaagcgtagtattagggtgggaatgacccaattttccaggtgccgtctgtcacccctttctttgactaggaaagggaattccctgacccgttgtgcttcccgggtgaggcaatgcctcgccctgcttcagctcaagcttggtgcgctgcacccactgtcttgcacccactttccaacactccctagtgagatgaacccggtacctcagttggaaatgcagaaatcacacgtcttctgcgtcctcacgctgggagctgtagactggagctgttcctattcggccatcttggctccacctgtcgagatattttacattaactttctatgacatacttatagcaaaacttattttttcatgcagaatagtctatattctatatttattgtaaagcatataccgtacatggtgactagtcaccatgctgtacaataaattttctgaacttaataaaaaaaaaawaaaaaagggcggccgc

SEQ ID NO: 146 - DNA, 864 bp, Homo sapiens
ggcacgagcggaccgggcccgcggggctgctgcggggcgatcgggccgggccgctgccgcgccatggactcccgtgtccagcctgagttccagcctcactgagtggccacccccaaagtgctgccagccgaggaagcccccagcactgaccatgtctattatggaccacagccccaccacgggcgtggtcacagtcatcgtcatcctcattgccatcgcggccctgggggcctttgatcctgggctgctggtgctacctgcggctgcagcgcatcagccagtcagaggacgaggagagcatcgtgggggatggggagaccaaggaacccttcctgctggtgcagtattcggccaarggaccgtgcgtggagagaaaggccaagctgatkamtcccaaacggsccggaartycacggstgavccaggatgcaaaggccycctggtccctgtttgcaagccggccaagarggggctgggaggggcaaaamccatacggatgcgctgctgtctgagaggaagggctgacacttgctggcatggcctctgcgggtttcgtccatcgcatgcactgatgcccggggacttggctgtcctgggcttcccctcggcctccaggtgaggctgcccattgcaggcactgggtaggcctgaccttgctggggctcatggccctgtagcgcttttgttacttgaatgtctagctgagcctgtttttgatggagctactactgtaatgcgtgaactaacaaacctgtgaactgtaaataggcccctggaagcacgtgcttaagcccttttgctgatttttaaaaatatcatctagcgcaaaaaaaaaaaaaaaaaaaaaaaaaaaaaaaaaaaaaa

SEQ ID NO: 147 - DNA, 1267 bp, Homo sapiens
ggcacgagctgcaggggcggggcggcgccaagcgcagggagcccggctgagtggcagcccagattgaagatggatacgtgacaatcccagggaccgctgcactgacttcatttccttagacaagacacagtgtagggcccggcccgtgttggccccaggactcctttggaatatagctgtggacaatgaatcctgcgagcgatgggggcacatcagagagcatttttgacctggactatgcatcctgggggatccgctccacgctgatggtcgctggctttgtcttctacttgggcgtctttgtggtctgccaccagctgtcctcttccctgaatgccacttaccgttctttggtggccagagagaaggtcttctgggacctggcggccacgcgtgcagtctttggtgttcagagcacagccgcagctgtgggctctgctgggggaccctgtgctgcatgccgacaaggcgcgtggccagcagaactggtgctggtttcacatcacgacagcaacgggattcttttgctttgaaaatgttgcagtccacctgtccaacttgatcttccggacatttgacttgtttctggttatccaccatctctttgcctttcttgggtttcttggctgcttggtcaatctccaagctggccactatctagctatgaccacgttgctcctggagatgagcacgccctttacctgcgtttcctggatgctcttaaaggcgggctggtccgagtctctgttttggaagctcaaccagtggctgatgattcacatgtttcactgccgcatggttctaacctaccacatgtggtgggtgtgtttctggcactgggacggcctggtcagcagcctgtatctgcctcatttgacactgttccttgtcggactggctctgcttacgctaatcattaatccatattggacccataagaagactcagcagcttctcaatccggtggactggaacttcgcacagccagaagccaagagcaggccagaaggcaacgggcagctgctgcggaagaagaggccatagctgctccagccggggctccggggcggcagcagagctggcacaccgattctgggaagccccgcgaatgatggcttttgaattaatgaggcagtgaatgttttgtgtttacttctaagggaaatactaactttctttcgcattagtattaattttgaagtagctacaaagtatttttaagaaattataattttatgactgtcaaaaaaaaaaaaaaaaaaaaaaa

SEQ ID NO: 148 - DNA, 1258 bp, Homo sapiens
  misc_feature (1)..(1): n equals a,t,g, or c
  misc_feature (1196)..(1196): n equals a,t,g, or c
  misc_feature (1200)..(1200): n equals a,t,g, or c
  misc_feature (1237)..(1237): n equals a,t,g, or c
nagatggcgctacgtctgctgcggagggcggcgcgcggagctgcggcggcggcgctgctgaggctgaaagcgtctctagcagctgatatccccagacttggatatagttcctcatcccatcacaagtacatcccccggagggcagtgctttatgtacctggaaatgatgaaaagaaaataaagaagattccatccctgaatgtagattgtgcagtgctcgactgtgaggatggagtggctgcaaacaaaaagaatgaagctcgactgagaattgtaaaaactcttgaagacattgatctgggccctactgaaaaatgtgtgagagtcaactcagtttccagtggtctggcggaagaagacctagagacccttttgcaatcccgggtccttccttccagcctgatgctaccaaaggtggaaagtcctgaagaaatccagtggtttgcagacaaattttcattccacttaaaaggccgaaaacttgaacaaccaatgaatttaatcccttttgtggaaactgcaatgggtttgctcaattttaaggcagtgtgtgaagaaaccctgaaggtcgggcctcaagtaggtctctttctagatgcagtcgtttttggaggagaagactttcgagccagcataggtgcaacaagtagtaaagaaaccctggatattctctacgcccggcaaaagattgttgtcatagcgaaagcctttggtctccaagccgtagatctggtgtacattgactttcgagatggagctgggctgcttagacagtcacgagaaggagccgccatgggcttcactggtaagcaggtgattcaccctaaccaaattgccgtggtccaggagcagttttctccttcccctgaaaaaattaagtgggctgaagaactgattgctgcctttaaagaacatcaacaattaggaaagggggcctttactttccaagggagtatgatcgacatgccattactgaagcaggcccagaacactgttacgcttgccacctccatcaaggaaaaatgatctgttaaatgaagctgtcatcaggctaaagggtattgaagctgcagagggatcaacttgtgcttgccagaggacgccaatgaagtttgaaacaccaacaatcagagattttgtttctgttcctcattaaatcatgagcttttgtgcccgagactctggacggactgttncttnaggaatttaaccggatgggaagttttttaaacttttncaaccaacttttttaaggccc

SEQ ID NO: 149 - DNA, 883 bp, Homo sapiens
  misc_feature (19)..(19): n equals a,t,g, or c
gtcaccgtgggcgtttaantatgatccccggctcagattcgcagactgcactgaacttcggctctacgttgatgaagaagaagtctgatcctgagggtcccgcgctgctcttccctgagagtgaactttccatccggataggtagagctgggcttctttcagacaagagtgagaatggtgaggcatatcagagaaagaaggcggcagccactggccttccagagggtcctgctgtccctgtgccttctcgagggaatctggcacagcccggcggcagcagctggaggaggatcgcactgctcatcttggccatcactatacacaacgttccagagggtctcgctgttggagttggatttggggctatagaaaagacggcatctgctacctttgagagtgccaggaatttggccattggaatcgggatccagaatttccccgagggcctggctgtcagccttcccttgcgaggggcaggcttctccacctggagagctttctggtatgggcagctgagcggcatggtggagcccctggccggggtctttggtgcctttgccgtggtgctggctgagcccatcctgccctacgctctggcctttgctgccggtgccatggtctacgtggtcatggacgacatcatccccgaagcccagatcagtggtaatgggaaactggcatcctgggcctccatcctgggatttgtagtgatgatgtcactggacgttggcctgggctagggctgagacgcttcggaccccgggaaaggccatacgaagaaacagcagtggttggcttctatgggacaacaagcttctttcttcacattaaaacttttttccktcctctcttcttcaaaaaaaaaaaaaaaaaaaaactcgag

SEQ ID NO: 150 - DNA, 1465 bp, Homo sapiens
ggcacgagcgagccaagtttgcaccactgcactccagcctgggcgacagagcaagactcagtctcgaaaaaaaaaaagttggaagcagaagtaaaaaacatggtaaagaatgagaactaaataaatataataattgagaggtctgcattagatgtggcagggagaacaagcaaaaagagatttcagagaagatcactggaattggcagaggccttgaagggcagagtctagcatacagaagatgtaaagccacattctgtgaaggtaagtagatgtgtttacctcttttgcactgtactggtgcattatggggtaaatrtgtattacttttcctgtattgcttagcacagagttttgcctatagcaggcaccagactgtgggcttggtagtacatgactattggtgattacagatcaaaaaggacttgaaatgatcagtttaaggtcttgatgggtattgaagactcaaaggatgatggcaccctgggagtgatccacagaaggacagattatttgaagatgttaataactaaagacaacatggatgttaaatgatgaaaaaaagttggatggaaaataaaccattggatctgcytctggagtccaagaagaatattattcttcctacctcccccttactctggctcttcctattgtagccacatgggtcagtaatgccattgaaaaacaaaattttagactaagtggggtcgcagaaattttggtctatcttaaattgatgacatcttattaaagaatytattgtataaagtgtgcttattctggcatttttttaatgaagaaaaagtgtaattcagtgcacatttatgaatttcaaagatcaataaaaatgggcaaagtatatgaacgcataatccatagaagaagatatctgacaaatgcagttcaataaatatttttttaaataaaaattagcctgtggtaagaattgaaatggagaaagaaatagaaggtagccaggttacctacagctttgtatatgacactatagagctaggactttattccatagatgagggaagtctgctaaagtgtctacattgaacccattattttgctagcattgtagttgatgtacctaaaacagacttgagccggtagagtaagtaggcagacttgtccaagtgagaaaaagatgaaactgtggtgaggataaagagagaaaaggagcagatttaagaaatattaaaacttgaaagtactaagacttgatgatgaactagatgtgttagataagagatagcatggagtctagtaaaagttctgtttttctcactcgtgtgactgcctcaataacacaaagcttgataggaaataaacatgagatagcacatggatctattacaagtttttgaaattgagcttgaaaagctacttcaaaaaataaattctaggccaggtgtgagyccatgcgcttgattaaaaaaaaaaaaaaaaactcgta

SEQ ID NO: 151 - DNA, 1369 bp, Homo sapiens
cccacgcgtccgcccacgcgtccggctggcaagatggcgggaggggtgcgcccgctgmggggcctccgcgccttgtgtcgcgtgctgctcttcctctcgcagttctgcattctgtcgggcggtgaaagtactgaaatcccaccttatgtgatgaagtgtccgagcaatggtttgtgtagcaggcttcctgcagactgtatagactgcacaacaaatttctcctgtacctatgggaagcctgtcacttttgactgtgcagtgaaaccatctgttacctgtgttgatcaagacttcaaatcccaaaagaacttcatcattaacatgacttgcagattttgctggcagcttcctgaaacagattacgagtgtaccaactccaccagctgcatgacggtgtcctgtcctcggcagcgctaccctgccaactgcacggtgcgggaccacgtccactgcttgggtaaccgtacttttcccaaaatgctatattgcaattggactggaggctataagtggtctacggctctggctctaagcatcaccctcggtgggtttggagcagaccgtttctacctgggccagtggsgggaaggcctcggcaagctcttcagcttcggtggcctgggaatatggacgctgatagacgtcctgctcattggagttggctatgttggaccagcagatggctctttgtacatttagctgtggtgtgtgcttcagaaaggagcagggcttagaaaaagcccttttgtccgtagagttgatgtggtgtgagtgatatatttctatgtttttaatgtacagcatctgtactttgtttgccttgataaaggtaagataaatgaaacgctgaactatgctaatctggaatttgtttttatttgcctgaaatatatttttttctgtgaaaaaattaaaacgtacttaagccaggagaatgaattatacagtgattgaaaatccatttaattcctatgacttttgttttgtattgcccaagtcaaactacatcacttgtatctccagcccaaatgtagtctgccttgaaaagtctttcagctgtgactgcaggaagtgggagtgtttttattgttagctaattgctgtgactgcaggaagtgggagtgtttctgttgttggctaattgaagttattaggctcagcttcagtcatgtgtaagttttgcagtgtaatacatatgtagtctggtctgtatatatgaaaatttgaattaaactgcagaatgtttatgtctagttatggtttaaattttcttagtagtatataaaaggtaagagtactgaaaaattaataaaattgcaagttaaraaaaaaaaaaaaaaaaaaaaaaaaaaaaaaaaggagggggggc

SEQ ID NO: 152 - DNA, 596 bp, Homo sapiens
  misc_feature (4)..(4): n equals a,t,g, or c
  misc_feature (8)..(8): n equals a,t,g, or c
  misc_feature (28)..(28): n equals a,t,g, or c
  misc_feature (57)..(57): n equals a,t,g, or c
  misc_feature (61)..(61): n equals a,t,g, or c
gganaccngctttgccccttggtttccncaaagctcgaatttaccctcactaagggnaccnaaagctggagctcccaccgcgttggcggcccgctctagaactagtggaccccccgggctgcaggaattcggcacgagtcctgacctcaggtgatccacccacctcggcttcccaaagtgctaggattataggcttgagctactgtgcccggcccatggtgtttttctttagggctcttcctacagccttgagaagtagataggcatcagagtatggtactataggaatcagaaaaattcaaaacaaatgtggattaagtgtttaggctctatgtggctcacgcagccagaatccttaagtctgtgtgtttctgtgtctcaagactgggctcacattctggctttgtccataacaatgctctgggatttcagggagttccctcatttgtaaaatgagggggtcagagcaggtgatatccatgtttcttccctttctgatattgttgtctgtggcatattctttgtatggcgaatttaataaattatattaatgtgtctctttgaaaaaaaaaaaaaaaaaaaaaaaaaaactcgta

SEQ ID NO: 153 - DNA, 629 bp, Homo sapiens
ggcacgagaacctttggggctgacacaagatcctttagtgtttgggatgacctctttcctgcagacttcttcccctatccctaactcatgcatggaaaacgtttgtcaggctggtttcccgagcctcctgcacctcaacatcacgctcacccttttgggtttagcccagtgttatttagcaaatttctccagctgcagggaaggatcagagcactatctttttttttttttttttctcctggagccaggactgcacaaggcaatggccaaatttagttgaattcagcctaccatcctttgctgatgactcagctctatgccaagtactggagccacagagatgggtcagtcccagcccctgtcctcaggaagcccatggtcagggaaacgttgtagggataagtaatagagggcagttgccttcagggctcctggtggctgctggtccctatggtgccttgatgtgaattagaagacggtgccctttccaggtggattcagacctacactagaacgcacagctttgggagtgacacacaggttggattttagcaccccttgccccttggccagaggtgccctgctgcacggccatacgctgcagcctcgagggacacacaggccaaagt

SEQ ID NO: 154 - DNA, 2497 bp, Homo sapiens
ctgagccactgtgcccagcctcggctcaggtttttcaatacagtcttgaccttggcattcagtatcctcacagcatggttctaattaactttctagctctatttcccttttcctgctccctctctctacaactagtctttctctgattgccccgccctcaacccatctaaactagaccccagggaagcaccttggtccccttcctctctcccactcaccatccaaccaatcaccagagcctgtacattctatattttcaacatcgattcaattgtctacttctttctagcctgccctctctgactgggactccttgagccagcctgatcaccccaatccatccctcacactgtgcccatctttctgaagtaggaatctgatcacaccaccctgctaaaaacactctggttctccccacggcatgtggtgcccttgtatagctggcaaagccttgcatggcacggccccagcctgtgcttcaactcaattgcccgactctctccagctctgctgagccacctaagtcacagatggtttctcctctcatctctgctctcttccatgtgccatttctgtggcttggaatgttcttccctcattctctttctggccctttcccgtcacaccttagacgtgcatcttcctctcgaaaacctctagtgaagcctcccagggccaggcagtaccctcctctggcttcttctggatacagaggaagaatctgagcatcgattctccatctcagcaggcctctgtgtgcctgctgactccgactagaccagagatccgtaaggacagggatcgagttttttttcttttaattcactgcctcaaaaatcctctgtgcattacctattcatcctcttctctcccttaacctgaaccagtgatcttactgtctccatcattgtttttttcttttcttttcttttcttttttttttttgaggtggagtctggctcttcacccaggctggagtgcagtgatgcgatctcgactcactgcaacctccatctcctgggttcaagcgattctcctgcctcagcctccccagtagctgggattacaggcatgcgctaccatccccaactaatttttgcctccataattttgccttttctagaatgtcatacaggtggaattactcagtatgctgcctttttcagattggcttctttcacttagtaatatgcttgttttttgagacagggtcttgctctgtcgcccaggctagagtgtggtggtgcgatcttagctcactgaaacctccacctcccaggttcaagtgactctcctgcctcagcctcccgagtagctgggactacaggcacgtgccaccatacccggctaatttgtggatttttagtacagacggggtttcgtcatgttggccagggtgttgttgaattcctgacctcaagtgatccacctgcctcagcctcccaaagtgttgcgattacaggtgtgagccactgcgccaagcctcatttagtaatatgcatttaaactttctccatgtctttaatggcttgatagctcatttatttttatcatggaatatttcattgtctggatggaccacagtttatttctccattcacctactgaaggacatctcggttgcttctaagttttggcaattatgaataaagctgctataaccatcaagtgcaggtttttgtgtggacctattatcaactaattcgggtaaatctcaaggagtgcaattgctggatcacacagtaagagtgtgtttagttttaagtggctgtgccattttgcattcccaccagcaatgaatgagagtttctgttgctccacattctcactaccattcggtgttgtcagtgttttgcattttggccattctagtaggtgtttacatggtatctagtcatttgaatgggcatatgatgtggaacatctttttttttttaattttattattattatactttaagttttagggtacatgtgcacaacgtgcaggtttgttacatatgtatacatgtgccatgttggtgtgctgcacccattaactagtcatttagcattaggtatatctcctaatgctattggaacatcttttcatgtgtttatttgccatctgtatatcttccctgatgagttggggatgcattctttccatctcagagtccccagaaactaacatagcagttggtacagagttggtgctcaacaaacatcagcttaggaactatgtcctatgtttttttgtttttttttttttttaaaaaggaatgtgagctgttcccaaaacgtatgtccttcccccatgcctctaccctgcccttccacaaactttctgatcttcagcacacactacccaaccatcaaggctgagacttcccgtggccagcagtgtctcatgctggcttcaagccccacagcactgcttttttcaacttctcttgtggtttagactgtctttagcccagcaagagaattcgatatcaagcttatcgataccgtcgac

SEQ ID NO: 155 - DNA, 1217 bp, Homo sapiens
tctggaacctctctcttaattcatatttcccgtaagtctgtccatctgttgtgtggaatctcagtttgtgatattggatagatgcaaataagcaaagctgttacttttcatagtttcaaatgaaaaactcaacatcactactgtataaattattttctagtctatctgtgtttatttttaaattccttttactattctatacattgcacattgctctgggggtaaaaatccartataaaccattagctcattttattgaccattcttgtattcagcaagtatcccaagtacagtggtccataccttgaattttttttcactttttaagtgagatataatttacataccataacaacttagtgggtttcagttatttcaaatacaaggttgtwcatatatcatcactgtctaattccagaacattttatttttattttttttcagcagtggggtcctgccatgttgcccaggctggtcttgaactcctgggctcaagtgatcctcctgcctcagtctcccaaagtcctgggattacaggtgtgcgccaccacacccaccctcaaaacatttttatttcctaaaaaagaaaccccacatccataggcagttccacattccgttcttcctatgatccagctcttggcagctactatagttkgtttyctgtttctgtggatttgtctattctggacatagcatgtaattggagtcatacaatatatggctttttgtgcctggcttctttcacttagcataatgtttttaagattcattcatgttgtagcattatcagcactttgtttcttttatggctaaataacactgcattgtgtgsacataccacattttgtttatccgttaatcagttgatggatatttgggttgtttccacttcggggctattatggatgatgcttctctgaatatttgtgtacaagtttttgtgtggacatttgtttttagttcacttgagtatgtacctaggatggaattactgggtcatgtggtaactgttttaatttcgtaggaactgccaaattgtttcctaaagtggctacggtattttacattcccatcagtactgtatgacagttccgtttatccacatccactccaacacttgttgttatctgttttgattatataatagctattttagtgggtatgaagtcgtatttcaaaaaaaaaaggaattcgatatcaagcttatcgatacc

SEQ ID NO: 156 - DNA, 1123 bp, Homo sapiens
  misc_feature (213)..(213): n equals a,t,g, or c
caaaaataataatagtcatcacatttgtatagcactgggtcatttttcccaagaccatttagttacttgacctcagctgttgtccagcttccagtcttggggtaatggcagcttaataatctgaaaattgccaagagaaagatgtggaaggatgaaatggaggcaacatgaatttctgtcaccttgtcatatgttctcatttccakgccttgngagcaagagagttaggtatatcttctgtaactcagacaattttcttcctctttgcagaatggcccctaggaatcaaggtagcttttcttttggaaacttcatgctgtttttagtgttgatagaaaggaggtatctgccatttctgtcacctattttattttgttgtagcacccataatagatcagctgtcacagccacaaatctctgaggagactggaatcattcccagataaatcagaaagtcagaatcactttatggttatagtcctggcttcttgagagcttgtctggaggttgtagcaggggagcacagctagtcatataccctwgactarsgaccggtctwcctctattggggatggttgtcctcttctactgagcttgcagctttgggagggacgcacatggagtggtgagggaggaaggggacacccgcctagccagccagatcagctgaatcaaccctggcaatcaatggggtgacagatgttgcagccagatcgccctcacatccagtcctaccttcttggtaacaaaacaattggttttgctggtctagaaactgtagggctagacatgtattataggactggcttagggagagttactttatattagcactcatgttttcactcatttatttcttgtagctcattaaaagaaaaaccataattgagcatctactatatgccatgcattgtgctgagtatccatgatgctcaggtgaacgggacatggtcctgtaaaaagtgtaaagtctgctgggaaagttagtgctcaaaagtgtaactaaatacttgaggcaagtgctttactagggaataaactaaatatcaagagaacaaagataagcaattccttcacgatgttttacatggtaaatccatacaattttaaaaaaaaaaaaaaa

SEQ ID NO: 157 - DNA, 3388 bp, Homo sapiens
cccacgcgtccgcaggtacagccaaccatgtcccagttcgaaatggacacgtatgctaagagccacgaccttatgtcaggtttctggaatgcctgctatgacatgcttatgagcagtgggcagcggcgccagtgggagcgcgcccagagtcgtcgggccttccaggagctggtgctggaacctgcgcagaggcgggcgcgcctggaggggctacgctacacggcagtgctgaagcagcaggcaacgcagcactccatggccctgctgcactggggggcgctgtggcgccagctcgccagcccatgtggggcctgggcgctgagggacactcccatcccccgctggaaactgtccagcgccgagacatattcacgcatgcgtctgaagctggtgcccaaccatcacttcgaccctcacctggaagccagcgctctccgagacaatctgggtgaggttcccctgacacccaccgaggaggcctcactgcctctggcagtgaccaaagaggccaaagtgagcaccccacccgagttgctgcaggaggaccagctcggcgaggacgagctggctgagctggagaccccgatggaggcagcagaactggatgagcagcgtgagaagctggtgctgtcggccgagtgccagctggtgacggtagtggccgtggtcccagggctgctggaggtcaccacacagaatgtatacttctacgatggcagcactgagcgcgtggaaaccgaggagggcatcggctatgatttccggcgcccactggcccagctgcgtgaggtccacctgcggcgtttcaacctgcgccgttcagcacttgagctcttctttatcgatcaggccaactacttcctcaacttcccatgcaaggtgggcacgaccccagtctcatctcctagccagactccgagaccccagcctggccccatcccaccccatacccaggtacggaaccaggtgtactcgtggctcctgcgcctacggcccccctctcaaggctacctaagcagccgctccccccaggagatgctgcgtgcctcaggccttacccagaaatgggtacagcgtgagatatccaacttcgagtacttgatgcaactcaacaccattgcggggcggacctacaatgacctgtctcagtaccctgtgttcccctgggtcctgcaggactacgtgtccccaaccctggacctcagcaacccagccgtcttccgggacctgtctaagcccatcggtgtggtgaaccccaagcatgcccagctcgtgagggagaagtatgaaagctttgaggacccagcagggaccattgacaagttccactatggcacccactactccaatgcagcaggcgtgatgcactacctcatccgcgtggagcccttcacctccctgcacgtccagctgcaaagtggccgctttgactgctccgaccggcagttccactcggtggcggcagcctggcaggcacgcctggagagccctgccgatgtgaaggagctcatcccggaattcttctactttcctgacttcctggagaaccagaacggttttgacctgggctgtctccagctgaccaacgagaaggtaggcgatgtggtgctacccccgtgggccagctctcctgaggacttcatccagcagcaccgccaggctctggagtcggagtatgtgtctgcacacctacacgagtggatcgacctcatctttggctacaagcagcgggggccagccgccgaggaggccctcaatgtcttctattactgcacctatgagggggctgtagacctggaccatgtgacagatgagcgggaacggaaggctctggagggcattatcagcaactttgggcagactccctgtcagctgctgaaggagccacatccaactcggctctcagctgaggaagcagcccatcgccttgcacgcctggacactaactcacctagcatcttccagcacctggacgaactcaaggcattcttcgcagaggttgtcagtgatggtgtacccctggtgctagccctggtcccccaccggcagccccactccttcatcacccagggttccccagacctgttggtgactgtgagtgccagtgggctgctgggcacccacagctggttgccctatgaccgcaacataagcaactacttcagcttcagcaaagaccccaccatgggcagccacaagacgcagcgactgctgagtggcccgtgggtgccaggcagtggtgtgagtggacaagcactggcagtggccccggatggaaagctgctattcagcggtggccactgggatggcagcctgcgggtgactgcactaccccgtggcaagctgttgagccagctcagctgccaccttgatgtagtaacctgccttgcactggacacctgtggcatctacctcatctcaggctcccgggacaccacgtgcatggtgtggcggctcctgcatcagggtggtctgtcagtaggcctggcaccaaagcctgtgcaggtcctgtatgggcatggggctgcagtgagctgtgtggccatcagcactgaacttgacatggctgtgtctggatctgaggatggaactgtgatcatacacactgtacgccgcggacagtttgtagcggcactacggcctctgggtgccacattccctggacctattttccacctggcattggggtccgaaggccagattgtggtacagagctcagcgtgggaacgtcctggggcccaggtcacctactccttgcacctgtattcagtcaatgggaagttgcgggcttcactgcccctggcagagcagcctacagccctgacggtgacagaggactttgtgttgctgggcaccgcccagtgcgccctgcacatcctccaactaaacacactgctcccggccgcgcctcccttgcccatgaaggtggccatccgcagcgtggccgtgaccaaggagcgcagccacgtgctggtgggcctggaggatggcaagctcatcgtggtggtcgcggggcagccctctgaggtgcgcagcagccagttcgcgcggaagctgtggcggtcctcgcggcgcatctcccaggtgtcctcgggagagacggaatacaaccctactgaggcgcgctgaacctggccagtccggctgctcgggccccgcccccggcaggcctggcccgggaggccccgcccagaagtcggcgggaacaccccggggtgggcagcccagggggtgagcggggcccaccctgcccagctcagggattggcgggcgatgttaccccctcagggattggcgggcggaagtcccgcccctcgccggctgaggggccgccctgagggccagcactggcgtctgcggccgctctagaggatccctcgaggggccc

SEQ ID NO: 158 - DNA, 529 bp, Homo sapiens
acgcgtccgattacttacgtgctcctggctgggatggcactgggcattcagaaaaggttctccccggaggtgctgggcctgtgtgcaagcacagcgctggtgtgggtggtgatggaggtgctggccctgctcctgggcctctacctggccaccgtgcgcagtgacctgagcacctttcacctgctggcctacagtggctacaaatacgtgggaatgatcctcagtgtgctcacggggctgctgttcggcagcgatggctactacgtggcgctggcctggacctcatcggcgctcatgtacttcattgtgcgctctttgcggacagcagccctgggccccgacagcatggggggccccgtcccccggcagcgtctccagctctacctgactctgggagctgcagccttccagcccctcatcatatactggctgactttccacctggtccggtgaccccctggccccagatggcactgagtttttcattcattgaagatttgatttccttgaaaaaaaaaaaaaaaaaaaa

SEQ ID NO: 159 - DNA, 1146 bp, Homo sapiens
cccgtccacaatgcagcagactcttcccaaggccacctagcaagcaaggttgatcggatcatctaaactggccgcctcctgaatatttcactgaatcctggcgttcatgttgaagcagacaaaatgagaaaggaggagggcattgctcacctctcaatagcttttttcgttcaagttctatgtctttatcagctcttgcctgtgattttaccccaattcaaccttgggagtgggaagaatatgaacagataacccttggcctaacagctccatcaaacctccttgagagcaactacctaggccaggctagtgagtgctttgtgaggaagctggtcagaaggttccctcaactccttcctggtcctcctggacactgcagaaaagacttaggggatccccagcagaggccaattgctctccttccttccctgccccaccaggaaaggaataacgtccacagacttgaagcagatagtgaagtagatctgtgagaggttctaggtacttagtgtgtagactttgacgaatatttctcaagttgggagcccttgttaaaaatgatgtttaagggagtggttggggggaagatgaaggcatggaggaggaagaagagaaggaagcccttgccatataaaattcatgcagactaaacagtttccctgacagaataaataaagtggatgctaccccactccagaatcaaaagcaatttaattaaagtctcttaagttgtaaagagttttaaatgatccgtgttgaaggcgaatsctgcyaaatgcagtgggtctgacgtcagctgccgggcctgggctgggaggccatttgctattctgtttaaggcaggctggattgtcttattttggaaccagcttggtggggggtttgctttgctactgcttctgagccctgagcttcaaaggctgaaattaatggtgaacaaaattgtgcggctctggccatcccatgcgggcaagcccattgagggttatcattaagtaaagaaataaagagggggaaaaaagcctgcctgttccaaaaacctcatcagataatgacctcagtgattgggttttcattaccaaacagcatccagagattatcaacccatagaagaagggaggggaaaaaaaaaaaaaaaaaaaattc

SEQ ID NO: 160 - DNA, 1346 bp, Homo sapiens
  misc_feature (537)..(537): n equals a,t,g, or c
  misc_feature (880)..(880): n equals a,t,g, or c
  misc_feature (1115)..(1115): n equals a,t,g, or c
ggcagaggcttgtgaagggtaaagtttaaacccctctgcttagcccctgcctccagcctctgccaggagtaatgtgctcccatagtactctgatccacttgtatttggtgcttccttttttttttcttttccttccttcctcctttcctttcccttcctyttcctsttcctccattcttccctccctccgtcttcctccattcttccctccctccctattcctccattcttccctccctccctccctctcacatcctttaggactcagcatcacctcctctaggcagtctttcctggaytaccaccayttatgcacaaaacacctaagcaytaccttatgtggcctcatttatcactgcttaaatattttttawacacgtgctgtgatgtggcacatgcaggtgtcattcttgakgatccactggttattgccttgaggggatgacaactgcccggtagggtwacctggtgtgactgcacctaaaacagcaataccaaagggcccattgccagttctgtcactgaccagctggggcntctgagtatatcccttaaccactttggaccttaatttggcatctgtcaaatgagatggtggaacttgaggaactctaaggcccctactgtgcaggtcttattaatgattacaacagcagcagcagccagtgtttactgaggacttacaaagcaccaagcactttgcctatcctaatccttacatcaactctacgaagttagtatggttactatccctattttacagatgaggagactaaggctaagagaggttatatgacttgaccacaaggtcataataaagaaacagatttgaatccaggcattctgactttactgttcttagccacataatgggcacasnttygacacacrgttttgtgtactgtttggtggtcactcacagactccatcccagactctgcatgaaccatccctgttctacatttttaaggctcaaactggagtctgggtgaaacctggggacagaagactgctatagtcacaattattagagggaaatgggtgaggaccagtggccagctctgttcatgaacctttgacaattctcacagagagtcttgctttggacagagacnacttacgttgctgttttcagttaccctctttaggaggggagagtaggcctgagtcatgcttcagacacagattaaaatcagatttggtaccaggtgcagtggttcacgcctgtaatcccagcactttgggaggctgagttaggagtatcacttgaggccagaagtttgagagcagcctgggcgacatagtgagacatcctctctctttaaaaaaaaaaaaaaaaaactcga

SEQ ID NO: 161 - DNA, 1079 bp, Homo sapiens
ggcacgaggtgttagaaagttttcgaagcagtgtgagtcttgtacctttgtggtcctgtctcacagacacctgtctattccctgacccttttaaatgctaactttctgcctgtaggaaatcttccctttgtgcttaggtctttttcttctgtgagctttagataaacaacctagtgtttaaactttttaataagggattcattttttaatacatgagaattcatttcaaaattttggttttagttatttattttattctacttggctctttttcagacagatgttctctcctggattgtaaaagtcgaattcaaaggatttttatttgtaatatacttaacctttctcttgtaagttgccatctgtgtagatacagctttgattgcctgacaagaggaaaatgtttcccattatcttttcctgcctgaactatacggtcacttgtgttccagcatagtggttcttaaccctcatagtgtgtcagaatcactttgcagagcttttaaaaactctagatgcctggggaccaccccaaagactccattttgttgtcatgggtcaaagcacagtcttctagtttgcagctagtgttgagtacaactagagtttaacccagttgaattttagtttaatcttggctggtcttgaagatgttagtaatctctattcatttttttkgaaaagtaccaatgaratcagaaagttaattagaaaacatctagttgaatcccctgtttttaatagatggggaaaccaagacccagagaatataatccaaagctacctgtcacataggccacaatttcttttccaatattctgttcttcgctgttcttctaatttgcagaactcctctttaaaaaacctttggagaatgtattggcctcataccctcttccttcagcctgaaagacatgcacctgtcacttatttatgatatttaaatgcaacctctagaacaggggtgtccaatcttctggcttccctgggccacattggaagaagaaatgtcctgggccacacataaaatacactaatgatagccgatgaacttaaaaaaaaaaaaaaaaaaactcgta

SEQ ID NO: 162 - DNA, 2103 bp, Homo sapiens
  misc_feature (2101)..(2102): n equals a,t,g, or c
ttcctcgtagcgagcctagtggcgggtgtttgcattgaaacgtgagcgcgacccgaccttaaagagtggggagcaaagggaggacagagccctttaaaacgaggcgggtggtgcctgcccctttaagggcggggcgtccggacgactgtatctgagccccagactgccccgagtttctgtcgcaggctgcgaggaaaggcccctaggctgggtctgggtgcttggcggcggcggcttcctccccgctcgtcctccccgggcccagaggcacctcggcttcagtcatgctgagcagagtatggaagcacctgactacgaatgctatccgtgcgagaacagctattccacgagaggatccgcgagtgtattatatcaacacttctgtttgcaacactgtacatcctctgccacatcttcctgacccgcttcaagaagcctgctgagttcaccacagggtgtcctgggccgggtctmtgagacagtggtgatgttgatgctcctcactctgctggtgctaggtatggtgtgggtggcatcagccattgtggacaagaacaaggccaacagagagtcactctatgacttttgggagtactatctcccctacctctactcatgcatctccttccttggggttctgctgctcctggctgctggaagacctggaggagcagctgtactgctcagcctttgaggaggcagccctgacccgcaggatctgtaatcctacttcctgctggctgcctttagacatggagctgctacacagacaggtcctggctctgcagacacagagggtcctgctgggtatgtggcttcgtagggcttgggatacctgggtttccccaaggagagtagcccctggttccaggtgcttgctgacagcctcccatccctgcacagagaagaggcggaaggcttcagcctgkcaacggaacctgggctaccccctggctatgctgtgcttgctggtgctgacgggcctgtctgtgctcattgtggccatccacatcctggagctgctcatcgatgaggctgccatgccccgaggcatgcagggtacctccttaggccaggtctccttctccaagctgggctcctttggtgccgtcattcaggttgtactcatcttttacctaatggtgtcctcagttgtgggcttctatagctctccactcttccggagcctgcggcccagatggcacgacactgccatgacgcagataattgggaactgtgtctgtctcctggtcctaagctcagcacttcctgtcttctctcgaaccctggggctcactcgctttgacctgctgggtgactttggacgcttcaactggctgggcaatttctacattgtgttcctctacaacgcagcctttgcaggcctcaccacactctgtctggtgaagaccttcactgcagctgtgcgggcagagctgatccgggcctttgggctggacagactgccgctgcccgtctccggtttcccccaggcatctaggaagacccagcaccagtgacctccagctgggggtgggaaggaaaaaactggacactgccatctgctgcctaggcctggagggaagcccaaggctacttggacctcaggacctggaatctgagagggtgggtggcagaggggagcagagccatctgcactattgcataatctgagccagagtttgggaccaggacctcctgcttttccatacttaactgtggcctcagcatggggtagggctgggtgactgggtctagcccctgatcccaaatctgtttacacatcaatctgcctcactgctgttctgggccatccccatagccatgtttacatgatttgatgtgcaatagggtggggtaggggcagggaaaggactgggccagggcaggctcgggagatagattgtctcccttgcctctggcccagcagagcctaagcactgtgctatcctggaggggctttggaccacctgaaagaccaaggggatagggaggaggaggcttcagccatcagcaataaagttgatcccagggtttgctttgtttttttaaaaaaaaaaaaaaaaaaaaaaaaaaaaaaaaaaaaaaaaaaaaaaaaaanna

SEQ ID NO: 163 - DNA, 1370 bp, Homo sapiens
tggttaaagagtacgacattttagtcagggctgagcacagcgcctggccgaggagtgcttttatatgctcttggaagtatatggggactccatttctgtcactgtggcgattccacttatgcattcaccatgccaatccaaggcagctgatggcttaggaaagtcagagactgagatgttaaaatccttggggctatctaccaacatgtctccattccacctgttagggttaaaggtttttctaacctgggccctgaccttagcacagatctgcctatatttttttgaagttcagccacttggactattagccctaaactttttctgtactgccactgcagggctgaaggagctttgcatgcatccaccaagtctggctttcacacctgaatttcacacctcgctttcacccttagctattccatctttctgtggaacatcagtgtcacttagcaatagccatacaatcccattatccttatacctacctttcccttcaaagtctcggatgcctgatacattgcacctgctagtgcattcactcccattagtacactcccaagtccttccagtgaaagatgtaacaattgaatggccactgtgccaaaggtgcctgggctctacctgccaccagtgatggggtcctcacagccaacccagtggtgtatcatccatttccaaaaccatctcamtgcctgttttcttggaccactcctggcatcaactgtttcaggttagagtgactgaaaatttgggktataagatatttattagagatcaatatctattaaaaatgtgaaaggaagcaggattktgctgaggaagaagataacaacaaagataccacaatgtcagcccatcaaagcctttggccaacccagcasaaaaatctggagcaggtgtayctttttcagagtctccccagttaggtcaaaatgtgcgcctttacacccgcacttccctcaatcacgggcttcaggctgtcctgggcatgacctcagatgaagcggctcacacagctgaggctaacgttgtcggagctgacagctgaaagccgtttgctgaccacactcccacagccgagcagcatgcccttgcttggaggaggatttggatgacacagctctatgtctgccgtattttgggggtcacattcctcacacccagctctgcctcaaatggcaacattgacaaaaattcattccagttgcaaaccaattgtagaatactataaaaccagagtacaagtctaatagcataaatctcatcctaagtggaaaagaaagggtcatttattcacacatttttggggaaaaaaaaacaacctttgctatgtctttattacaacacggatactcacaaaaaatagt

SEQ ID NO: 164 - DNA, 1212 bp, Homo sapiens
gccaagcttggcacgargttggtggcggcgtccggaggtgctggtttgttctcggtgaacggcgcgcggggtctctcctgagtgcgagctacgggaccttcgccatgccggggatggtactcttcggccggcgctgggccatcgccagcgacgacttggtcttcccagggttcttcgagctggtcgtgcgagtgctgtggtggattggcattctgacgttgtatctcatgcacagaggaaagctggactgtgctggtggagccttgctcagcagttacttgatcgtcctcatgattctcctggcagttgtcatatgtactgtgtcagccatcatgtgtgtcagcatgagaggaacgatttgtaaccctggaccgcggaagtctatgtctaagctgctttacatccgcctggcgctgttttttccagagatggtctgggcctctctgggggctgcctgggtggcagatggtgttcagtgcgacaggacagttgtaaacggcatcatcgcaaccgtcgtggtcagttggatcatcatcgctgccacagtggtttccattatcattgtctttgaccctcttggggggaaaatggctccatattcctctgccggccccagccacctggatagtcatgattcaagccagttacttaatggcctcaagacagcagctacaagcgtgtgggaaaccagaatcaagctcttgtgctgttgcattgggaaagacgaccatactcgggttgcttyttcgagtacggcagagcttttctcaacctacttttcagacacagatctggtgcccagcgacattgcggcgggcctcgccctgcttcatcagcaacaggacaatatcaggaacaaccaagacctgcccaggtggtctgccatgccccagggagctcccaggaagctgatctggatgcagaattagaaaactgccatcattacatgcagtttgcagcagcggcctatgggtggsccctctacatctacagaaaccccctcacggggctgtgcaggaytggtggtgactgaaattagctggacatggttgcacacacctgtaatcacagctactcgggaggttgaggcgggagaatcgcttgaaccagggagttggaggttgcagtgagtggagatcacaccattgccctgcagcctaagcaacagagcaagattctgtctcaaaaaaaaaaaaaaaaaaaaaactcgag

SEQ ID NO: 165 - DNA, 616 bp, Homo sapiens
  misc_feature (17)..(17): n equals a,t,g, or c
  misc_feature (580)..(580): n equals a,t,g, or c
cmgctrctragcaactnagtgggatsccccgggctgcaggaattcggcacgaggagaacggctgcacgtgggagatgctccgtggatgtttgtagaacgctggcttccgtgtttcctcgttgtggctgtggtggtgtgggtctttgcctgtggacccgtggaagacaaagaagacagttttggatggtcaagctattttcttgcttcagggctccctcccctgctttttgaagcctcacaaaccaggactgtgagggcaggaaggcttggggtctttgtgtgctgagcctcattagggttttaagaacctccctcctttcatctctagcttacgagagggatgattcattatcttccctcctcaggctgcagtagaagcagacagtctctgcctccctgcttgcctttcctccctcccattcactgttgattattgccctcaagaataacaggttgcccagctactcgagargcttaagtgggaggattgcttgaccccaggagttcgaggctgcagtgagctatgatcgcttcactgcgctatagcctggcagacacagagagaccctatctcaagcanacagacaaacaaaaaaaaaaaaaaaaaaaactcgag

SEQ ID NO: 166 - DNA, 524 bp, Homo sapiens
gcacagagggcttgggtgcaggtggtttatttgggaagtcatcctggaaaatccaaaaggaagggatggagaagagatagaagacaagaaagaatgcattgctcgtgggtcatgggtatagaaagtttctaggaagcttctgcagaaccctatgcaatgtgcctcgaattgtccaaggaattgaatggggagctggtgcatttgtacactacttctgttgctcactgatgggcaacagggcttttatccccagcctttccaggctgccccggggagacagcagctatggggaggcaccaacccatgggctgtactcattccagaatccttcctcccctacacgctgacagtcaattattcaccaagttgtaacttcgaattctacttacctaaaatgcgtttggcatacatctgcatgtcacactcacactgtccctatcttggtcgagacattataatcactctcctgaactactgcagcagcttcctagctgaactcctggctcatctggtctatattgctg

SEQ ID NO: 167 - DNA, 1042 bp, Homo sapiens
  misc_feature (222)..(222): n equals a,t,g, or c
gaatcggcacgaggaaatattactgaattttcttttattatcaaatacaaatttagcatatcctatgtaaaatgctgattgcccttttctgcatattatttcagatcttgttttctatacccacaaggattttctatatatttctcataaacaagagagtccacatatttactacttaccttatgagtgaacaaaaaaatcacgattgggttcgcagaactncaaagttgcaccgtgtgtggctcattagtggaaaaatgctgctggttgcagatataaaggctctgatcaggtggctgtggggccctaatccagaatgagcacagttattttgatcaatggagtctaacctagtcctcccccaaggttcaaaatgtcctctggtgcttgcaattttcttacagtatttttttctaattgataccaagctgggactctcctggtatatcatatttggaaatgaaaagtgaaacaaatgagaattttccttttgcgttggtgaatgcatacagtgatttaagtttgggtgcatttctttcagtctgttgattgttctaggaatcgatgctcacagatcaatgagtcatgtccaatttcataaacaactgcctggggtgagtgtggcctcataaatgtgaacaaatagtaatggagtggcaatcaaacctaaagtgttactgcaaatcatgccatgctgaaagaagaaacatctcaaaaagagaataaacatttttagggtcgggtgtggtggttcatgcctataatatcagcactttgggaggccaaggcagaaggattgcttgaggctaggagttggagaccagcctgagtaacatagtgagaccccagtccttacaaaaaaaaaaaaaaattaacaaaggattgtggtgcatgcctgtagtcttagctactcgggaggctgaggagggaagacaactttaacccgggagttcaaggttrcagtgctatgattgcaccatcgcgttccagccttggtgacagagcaagactctgtctcaaaaaaaaaaaaaaaaaactcgaa

SEQ ID NO: 168 - DNA, 536 bp, Homo sapiens
  misc_feature (536)..(536): n equals a,t,g, or c
ggacgagtggggagctggaaggaggatggagtgggaagataatcttcccttggagttcagctgtcccgtgaccaaactcctctctgtccccagctggactcctctagatgctcagatgctccttctcttctttccttctctgtcacaccattcttctgttccttggctcttctgctcatctccttgtggagscawaggtttggggtttatatgagtacaggataggtgacatggtggatcaaaaggcaacattttgtgtgcaaaaacaggaatgcctgttcccattagggtcatgggttkccagggttgagggtggggcctttgctagggaaccaccctcttctacccagtattttcctgtctcctgtctgtatcaataggtacacaatatwtattaaattaatkaatgactatacattatgaaatgggaaatgcaaggtataaaggagaattgctgtccttgaaaagaaatttagtttgtttttttgttgagatggagtcttgctctaagctagagtgcagaatgtaatcaaggn

SEQ ID NO: 169 - DNA, 796 bp, Homo sapiens
ggcacgaggtgacgtgtttctgcatctgttgccatgacaagctccctgcttcacccattgctgtatccccagcacctctctcactgcctggcaagggaaagcactcagaagacgctgaatgaccargtagagtgatgggttgtacagcactgttactccttttccatctctgtgtcccatgtgaaccttatggcacccatgagaaggagcttgtaccaggtttatactttctagtttacagatgagaaaacaggatcagagtggtacagatattggtctaagtcacagagaaagtgaattgtaaaagcagaaacagagcacaggctgcctgacttctagtccagtgctttttgctcaaattgcctcttatttctcaggttattcttgaaatggcagatggggattctgtttaatgaaacaaaagtgacaattctttctttcttggagagaaggtggagacagggtctcactctatcacacaggctggagtgcagtggctcaatcatggctcactgcagcctcaatctcctgggctcaagtgattcttccaccttagcctccttgactcactgggactacaggtgcacaccaccatacctggctaatttttaaagttttttgtagagacagggtctcactatattgtgcattctggtcttgaactcctggtcccaagtgatcttcctgcctcggctttccaaagtgctggaattacaggcatcacccccatgcctagcctgaaaattctttctatgtccttaacatcttctttcccagtatttctccatccactcga

SEQ ID NO: 170 - DNA, 1037 bp, Homo sapiens
ggcacgagctcgtgccraattcggcacgagggtcatagtccacagaggtaaaagttaacaattctgatgctcttgtatgtgcataccagaggctctagggaagaattccctctttctttcttccaccttcttgtggctgctggcattctttggcttgtggtcacatcactcctatcttgaaggccagcatcttcaaatctgtttcttcttcacatagccttctgtgtgtgcagtgccctctacctctctcttataaagacatttgtgattaaatggagggtttaggataatctcgtcaagatccttaacttaatcacaactgcaaaaacctctttcccaaataaggtaacattcacaggttccagggattaggacctattatctttggtaagtattattcagcctaccacaatagctaaaacaattctgaaaaagaagaataaagtgagagaaatcagtttatctgatttcgatacttattgtatagctatggtaaataaggctgcatggtattaaagaaaggacatatatgaatgaaacagaatagaggacccagaaatagacccacacaaaggagcccaaattatttttaaccaaggtagaagacaatttattggaggaaagacagccttttcaacaaatggtactataacaattagatatccataggcaaaaaaaaaaaaaagaatcttgatctaaggctcacaccttatataaaataatattaaactcatggccaggcacagtgactcatgcctataatcccaatacactgggaggctgaggcaagagtatcacttgaggccaggggttcaagactagcctgggcaacacagtgaaactctatctctacaaaaaaattataaactagctgggcatggtggcacatgcctgtagtcacaactactcacgaggctgagaagatcacttaagctgagttgttcaaggttctaatgagctacaatcgtgccactgcactccagcctaggtgacagacaaagaccccatctcaaaaaaaaaaaaaaaaaaaactcgta

SEQ ID NO: 171 - DNA, 841 bp, Homo sapiens
gggctgcaggaattcggcacgagctcgtgccgactctcagagcagggaacagcgggggaaaatgtttacactccatgcacaatctgtgcttccagtccctcaccctatgtggcccaatagctggctggatttcacacttaattggtatttttttctgccttcttcccctgcccccactgactcctctcctctccctttgattgtactcaaggttctggggcctgggccctgggtgggtaccaacagctgctcgctgttcccatgtcctctctccagctttgctgtgtttctctgctacctaatctcagtgactgtgaaaggacattgtgtctgagccatggccagccgctggctggccccctgatctgccccccttctattgtttggatggccatctcctgctgggcctccctgactgtaaaatctctgtactgtttgttaggtttttggtgggaggctgtgataagttccaatgagctgccacttccctggatatgtcaagaagctgatggcaacttggccaattctggcagatatcaggcccccagttcagccccagtcaccctcttttacacatgtgggtcaaccactgtgtgctcagagggtcagtcccttcctctgctgtgtttttcttgagtccttgcactcacttcccctgccccagtcacgatgacccctaaagcttcctttgcccttgctttctagggcatccctagtgaaggggcaaacctgagatttctccgtggacctgacagccaaggcagggcactgtctcctgaggccagtgccagcacgtgcatggttcacagaaaaggatcctgggctcagaatctcgaggggg

SEQ ID NO: 172 - DNA, 2128 bp, Homo sapiens
gtctacctccgggctgaaacgtcaccatgcctccccacagacagacggatggacagatgggcctccctgcacctgctctgtgggtgtgggggctcctgctcagcagcagtttccagacccttctccctgctttccccaagccacccgccttgaatctggggtgctctaccagacccatcccctcatttctaaagatttgagccactagtcgtgtccctctccctcagaaatgccttggtgacacttggctgctttcaactcttccacccatctgcctcttggtctcatctttaccttctgctaaaggtcctgacccccacccccgccacgccatggggcaccccatggtggtgcgtccttgggagcagctctgtccctttccccgtggcctttgccccgcctcctatgacttcgattcccacctgtccccgacccctgggaccactgaccgggcccgatcaccctgtcactgccctgtcatctgcttaccccacacggtgctctgctgacccaggtcttgctgtctcccaacagccccacgaggcttcccgtcgctcctggacactgcaggctgagcccgctgccccgccgcctccatgaggaaggcttttcctctgtgagccccaggccaccctttccctcctttaagtaattacttaagtcccttgccagggccctcccagtaccctttctaaagacacccctgccccagcatgctgcaggctcctgctccactttcctctcaggccctcgtcgctgtggtgctgcctttgttttctgtctctgccacggcagggggtcagctccttggaggtggggcttctgcccttgctgtaccactgcctggcacacagtaggtgctcaataaagacttgcagggtgagctgcctgaagaatagtcaccagaggccagaaatgtctagagctctgccggtagggtgactggccgaggagcctggcctgcatgtgtgcgtgtgtgtgtgtgtgtgtgtgtgtgtgagtcagggtttatatgcaggtgtctacaggagacatgctgggttctgtgctgggtgtgaggaatatgggagcagaaccccagggaggtggcagagacttgggggccaaagggctggggtgcaggggggcaacagccaggtgccactggccaccccagccgcagggagccctgcccaccctccaggtgcctggatgtccaacctcactgctattcccacctcaagccaggcctggagatggaggccccatgactcagccagggccggtttgcagctgcggctgacccagacgggcgggcagcccccagcccccgggcctgcacccaggacagggccgccctccctccctcccccgcttctggctcctaggacaggattctctgaattcagctcccctgaggctggggccaggttggaggccaggcctgggggctctgggctggggtcccagataggggctgggcggccaggcttggaatctggaatccagccccattcctggcatctgcaggagcctcgtggggagggagacttgggatggacttcaaccagccagggctggattcttgccccggaacctgcattcctggggcagccaagggatccttcccacttctgggcccagcttggccctgcctggcattcgaggcccatctggggcttgggggtgtctccccaactctcagacataaggacacccttccaagcttgttccttcacctggcggggccctgagccccacacccctcccctgtcctttctccatccgacatcaagcgcctccctgcctctgctcgcacagtctctgagatggggaactcagcacctcacaggtgggcccagctctggtgctgtctgtgttgggggagctggggcagcccccaaaagaccttggagacagaccctcagaggcaggagcagaggctggcagtggatgctgtgcctggaggccttgagggcgaggtgtgatgatgaggcccaggctgcagggctctttctggctctccagctccggagaacaagggatttcctcctgctctgcccaccctccccagccagtgcatgctcagcctcagcaccgcacctgggcgccctccatgatctgccccacctggacacatggctcgagg

SEQ ID NO: 173 - DNA, 748 bp, Homo sapiens
ggcacgagcgaaactgttttccaatgtggctgaaccactctgcatttccaccagtaatgagaatgagagttgctgttgctccacggcctcaccagcatttggtggtgtcagtgtcttggattttagccatcctaataagtgttagtggctatcattgttttcatttgcaattctcttacatggtgtkgaacatctttccccatgtttatttgtcatctgcatatcttcttcggccagttatctgttcagatcttttgcccgtttttgtttgcttgcatgtttgtttgtgtttgattttttaaagaaagctttttttattattgagttgtaatagtgcttgtatagtgtggataacagttctctatcagataggtcttttgcaaatattttccccaatctgtggactgtcttctcattcttttgataaatggctttaaaataataatctggccgggcgcagtggctcatgcctgtaattccagcactttgggaggccaagggcagatcatctgaggtcgggagttcgagaccagcctgaccaacatggagaaaccccatctctactaaaaatataaaattagtcgggcgtggaggcacatgcctgtaatcccagctacttgagaggctgagacaggagaatctcttgaacccgggaggtggaggttgcagtgagccgaaatcgtgccactgtattccagcctggacaataagagcaaaactccatctcaaaaaaaaaaaaaaactcgag

SEQ ID NO: 174 - DNA, 297 bp, Homo sapiens
ggcacgaggtgtgtttgtgtgtgtgtgtggtgtgtgtatgtgtgtggtgtgtgtatgtgtgtggtgtatgtgtgtgtgtggtgtatgtgtgtgtttgtgtgtgtgtggtgtgtgtatgtgtatttctttgaatgagaaattggctcccatgattatggagctgacaactcccaaggtctgcaggcagcaagctggaggcccaggagggccggtggtgtggctgcagccagtgtctgaaggcctgagaaccaggagggcgggtggtgcagctgcagtgtgaaagccggcaggctcgga

SEQ ID NO: 175 - DNA, 1681 bp, Homo sapiens
gaattcggcacgagtcgagttttttattcctccactgagaatcacacaaaaagttagaagcacaaaaagtatgatgggtaatgatttgctccacctcgtgttcttgcaactaagtttaggtgtagcatcagggggatggattttgtggccactgaggagattgggtggtgcccatacgagtaaggatmcaaataaaaatggmcacsytgtgcattgcttggtcattaccaatgagcctctagtttccamcaagaagattgggctctcttctcctcacacttgtccatcaactctccaacagttttgatccccactgtaattaaactagtatcttctaaacacaaaatcttcactctacctcagtagcgcttggcagctgaaatcttttctatttagaatatcccacctttctatcttgaaattttgtccaagctaaatgcctcctactaatctctgcgtacctgcgggaacacaatgtggctaccacattggctaccagggctgtagggaggattgtctcaaaatcctctccatttatcacaraaagggaggcgggaaraggaaraaagtaggttatgccctgaggctcaaggctactggatggccaatctgtgctaggtttgctggtcagaaagtaggatgatatgagctgatatagsagagaaatatagggtacagtttctaccctgaggggctgtattttagttggggagatacatgcaatgactggacaccaccaccaaggataaggaagtcctgggattgtgtgaaagccacagcagttcagagaggagaaggaaaaagactccatggaaatgatgggaattgaaccaggcctgggttttccccctctcaggcacactggaggctgtttgcctaccctgttgcatctcttggcttttccaagtttctgtcttgttacagactctttcctctcttcctcctcctagaaatattggcaagcttctttagtcatttgtgtttctttacattacaggccagaggtgtatcttctctgatagataatggccctcagttaagactagggaaagctattttgcttgctgtattagcgccctattttagaataatcctattcccttgattctttagtatttacaatttttctaagtaccgattatattttctaagtcaaagtggggtaaaattagtgcattgtatcctgttgttgccgctttctggagtagtcagtcttacatatttgaacaataccaccctggtgtaattttaaaaagtaagagcttgattctttaaaaaacacttagccaggcagtgtgagctctctctgaggatcctcacattaggagtgttttacatacatcacacaaaaggaaaatgcgttctgaggggatcggggctcctccgagctgagagctggacctgatgaattgtgacaaatgggcctgtttctgccagctgcacgttctcagccaggtgacgtctgaggctgcctgccagtaatggtttgtggtttggggagcaagagggaggccctggacatactcactggtggggaacaggaaaaagtcaggcccaatcagaaatagtaactctcctcagtgttccccagctaagtaagactatgcatttaccatacagtccccatcctaaaactcatgaaatgaagaattagtgacacactgggggagtagtggctcga

SEQ ID NO: 176 - DNA, 1894 bp, Homo sapiens
ggcacgagcagtctacctggaaattgtcacattatacaaatgtcaacttttgtgtgtgtgtgtgtgttttgttttgttttgcggtcagaggcaagggctaaaagaaagcaagatcagagaaataccaagaggtgtttactgactaaagggcaaagggatctatcagttaaccaaagcaagataaatagaactgccaattaactttatattctcagaagcagtgagcaaagaacgctgcctgaacaatgaaagtgttgctgcaactttcatatttgctgttgtctgcatgtaatttgtttccttttacatagaaatatgtggtattaacagagggatgtgattagaataccagcggaagctctctttgataggagacacacaggcaggtgcctaacagcctatggagatcaggacagtttctctccagtaaactcacaaattgtggggaccatgatctgcttaataagtaaaagggcaatggggccaagattacaatgttgaaaacatccaggcttcccacctggagtcctggcctcacagtaataataagaataaagatgtattgagatatatctagacctaactatataaatagacagatagatatacacacatacacacactgtgctaagatgcttcacatgaactccctcatttcaccctcaaacaaccacagggtagatggtttatcaccgttttagagataagaaaactccagttagtacgtcactgaagatctacacagtgacgtagatgttgtgatagacatttcttaaaaatattccaattaatcctcagaacacctgtgagaagtatactaaatatactaagctccattttatgaatgaggaatcagagtcaaggagacgagataacatgtcccaggtgacggtattagcggtcatagcaggatttgagcccagctctgtctgtcttcaaaactcatgtttaggagactcttctgctttccaccaaagcccttgatttgaacctttgctctctcctgaatccacacttctcctgaaggaggagcaaggtggagatgggatagggcacaggatggctgactctctgactggagggcctaagaaaccccactttgacacacacacagaaaactgtgccctgggtgggggtgtggggcttcatgagaaaatcaagtagcaagagagagtcttaacatgcttagatggcatgtgcctgttctcctgatttaatggatgagaaaactgagatccagggcaagggcagtgagatagtgagggtctcttagaatgagtacagccttcagggacccaccccatgtacccgtgggatcaagacgagccagaggatacctcctaagtaagaacagaaggaacagaaaacccttaaggtttgttgttgttgttgtgacagaatctcgctctgttgcccaggctggagagcagtggcacagtctcggctcactgcaacttctgcctcccaggttcaagcgattctcctgcctcaccctcccgagtagctgggattacaggcacccgccaccatgcctggctaatttttgtatttttaatacagacgaggtttcaccatgttggccaggctggtctcaaactcctgacctcaagtgatccacccaccccggcctcccaaagtgctgggattacaggcgtgagccaccgcacctggcctgaaaacacgtatcatacttgctatgtgccagacacaattctaaccacttttccacagattaactcagccttcaaacaatcctaaaaagtaggtatgattatttcctgcattttacagccaaagaaactgaagcacagagagattaagaggacttgtgcaaggtcatggagggctatagtcctaccctctgaagtaagttaaaccctctccagaaaaagcc

SEQ ID NO: 177 - DNA, 1355 bp, Homo sapiens
  misc_feature (1327)..(1327): n equals a,t,g, or c
gcccctgctggatggcactgtgggtaacctgcatcctttcactgtgcacatggttctcatgcctttacggagcagactccttggcaaataaatgcctcagtgcaggagccacacgcaaggcatttcccttctgtgtcctctttcgtgatcttgaggtgggacttgggtttgaaggctttgtcactcacctggcatgcaaactcttttgttattgtgaactctctgacagtgctttaagtctggggcacgaataaataattttccacacagctcacaactgtagggcttacatccagtgtgtgtgcgttatgtctgtgtgtgtatccttatttttttgagacggagtctccctctgtcacccaggctggagtgcagtggcgcgatctcggctcactgcaacctccgcctcctgggttcaaacgattctcctgcctcagcctcccgagtagctgggattacaggcacccaccamcacgcctggctaatttttgtatttttagtagagatggggtttctccatgttggtcaggctggtctcgatttcctgaccttgtgatccgcctgcctcggcctcccaaagtgctgtgattataggtgtgacacaccacacccggtcctgtgtatgttttgagacggagtctcactctgtcacccaggctgaagtgcagtggcaggatctcttctcactgcaacctccacctcctgggctcaagtgattctcctgcctcagcctcccaagtagctggtatttcagacttgcaccatgatgcctggctactttttatatttttagtagagacggagtttcaccagcctggtctcgaactcctgacctcaagtgatccacccaccttggcctcccaaagtactgggattacagacatgagccatcacgcccggcccctaagtggatttttaggcattctttcaggtgggcctctgtggtgaaaccttttgtgcacatttcacaaacggcttctccgctgtgtggcatttctcagctttctccactgccttcacaggaaacttcttcccgcactcctggccgacgtcgctccctaggtgactgtgcggcaaaagctcagacctcaggacactggtggctgttgtccagcctagtgtctgcttaccccgcactcatcccgtagtcacacgtgaaggcttgaggggtctggaacttcctggccgtagcaatggactttctgaactttcttgctctttcagaattgcgttttgaccctgagtgtggtcgtgggtgactcgccggcctcccgccccggggtgtggtgcctttgttctgagtcatcacaagtgccatcatcctgancctagcwtctttcagatcaccctctcga

SEQ ID NO: 178 - DNA, 1382 bp, Homo sapiens
cccacgcgtccgctgaattgcggccgtatgcgcggctctgtggagtgcacctggggttgggggcactgtgcccccagccccctgctcctttggactctacttctgtttgcagccccatttggcctgctgggggagaagacccgccagctgcttgagtttgacagcaccaacgtgtccgatacggcagcaaagcctttgggaagaccatatcctccatactccttggccgatttctcttggaacaacatcactgattcattggatcctgccaccctgagtgccacatttcaaggccaccccatgaacgaccctaccaggacttttgccaatggcagcctggccttcagggtccaggccttttccaggtccagccgaccagcccaaccccctcgcctcctgcacacagcagacacctgtcagctagaggtggccctgattggagcctctccccggggaaaccgttccctgtttgggctggaggtagccacattgggccagggccctgactgcccctcaatgcaggagcagcactccatcgacgatgaatatgcaccggccgtcttccagttggaccagctactgtggggctccctcccatcaggctttgcacagtggcgaccagtggcttactcccagaagccggggggccgagaatcagccctgccctgccaagcttcccctcttcatcctgccttagcatactctcttccccagtcacccattgtccgagccttctttgggtcccagaataacttctgtgccttcaatctgacgttcggggcttccacaggccctggctattgggaccaacactacctcagctggtcgatgctcctgggtgtgggcttccctccagtggacggcttgtccccactagtcctgggcatcatggcagtggccctgggtgccccagggctcatgctgctagggggcggcttggttctgctgctgcaccacaagaagtactcagagtaccagtccataaattaaggcccgctctctggagggaaggacattactgaacctgtcttgctgtgcctcgaaactctggaggttggagcatcaagttccagccggccccttcactcccccatcttgcttttctgtggaacctcagaggccagcctcgacttcctggagacccccaggtggggcttccttcatactttgttgggggactttggaggcgggcaggggacagggctattgataaggtccccttggtgttgccttcttgcatctccacacatttcccttggatgggacttgcaggcctaaatgagaggcattctgactggttggctgccctggaaggcaagaaaatagatttattttttttcaaaaaaaaaaaaaaaaaaaaaaaaaaaaaaaaaaaaaaaaaa

SEQ ID NO: 179 - DNA, 791 bp, Homo sapiens
cccacgcgtccggttctcctgcttgccatcaatggagtgacagagtgtttcacatttgctgccatgagcaaagaggaggtcgacaggtacaattttgtgatgctggccctgtcctcctcattcctggtgttatcctatctcttgacccgttggtgtggcagcgtgggcttcatcttggccaactgctttaacatgggcattcggatcacgcagagcctttgcttcatccaccgctactaccgaagagcccccacaggcccctggctggcctgcacctatcgccagtcctgctcgggacatttgccctcagtggtggggttactgctgtttcggaggtattcctctgctgtgagcagggctggccagccagactggcacacattgctgtgggggccttctgtctgggagcaactctcgggacagcattcctcacagagaccaagctgatccatttcctcaggactcagttaggtgtgcccagacgcactgacaaaatgacgtgacttcagggaagcctggacacccgaggcacctggaccagctatgggtagttctgtgggtggaacacattctgtgtaagagccccactgagggctctgcagcggagtgacagcaaccccagagatgaggcaccagagagtgccactgcatgagacacctgtgaccattcgaagtctgaaatgcggggggggagtttcatttttaagtgaagaccaaaagccctttaaaaataatagttttttatcattttatagtaaaaaaaaaaaaaaaaaaaaaaaaagggcggccgc

SEQ ID NO: 180 - DNA, 2163 bp, Homo sapiens
cgcccacgcgtccgaggcggcggagccccagccccacccagtgcggagcgcgccgcgagccccgccgyaagctgagcgcctccgcccgccaggcgcgccggcgccgggccatgtactcggggaaccgcagcggcggccacggctactgggacggcggcggggccgcgggcgctgaggggccggcgccggcggggacactgagccccgcgcccctcttcagccccggcacctacgagcgcctggcgctgctgctgggctccattgggctgctgggcgtcggcaacaacctgctggtgctcgtcctctactacaagttccagcggctccgcactcccactcacctcctcctggtcaacatcagcctcagcgacctgctggtgtccctcttcggggtcacctttaccttcgtgtcctgcctgaggaacggctgggtgtgggacaccgtgggctgcgtgtgggacgggtttagcggcagcctcttcgggattgtttccattgccaccctaaccgtgctggcctatgaacgttacattcgcgtggtccatgccagagtgatcaatttttcctgggcctggagggccattacctacatctggctctactcactggcgtgggcaggagcacctctcctgggatggaacaggtacatcctggacgtacacggactaggctgcactgtggactggaaatccaaggatgccaacgattcctcctttgtgcttttcttatttcttggctgcctggtggtgcccctgggtgtcatagcccattgctatggccatattctatattccattcgaatgcttcgttgtgtggaagatcttcagacaattcaagtgatcaagattttaaaatatgaaaagaaactggccaaaatgtgctttttaatgatattcaccttcctggtctgttggatgccttatatcgtgatctgcttcttggtggttaatggtcatggtcacctggtcactccaacaatatctattgtttcgtacctctttgctaaatcgaacactgtatacaatccagtgatttatgtcttcatgatcagaaagtttcgaagatcccttttgcagcttctgtgcctccgactgctgaggtgccagaggcctgctaaagacctaccagcagctggaagtgaaatgcagatcagacccattgtgatgtcacagaaagatggggacaggccaaagaaaaaagtgactttcaactcttcttccatcatttttatcatcaccagtgatgaatcactgtcagttgacgacagcgacaaaaccaatgggtccaaagttgatgtaatccaagttcgtcctttgtaggaatgaagaatggcaacgaaagatggggccttaaattggatgccacttttggactttcatcataagaagtgtctggaatacccgttctatgtaatatcaacagaaccttgtggtccagcaggaaatccgaattgcccatatgctcttgggcctcaggaagaggttgaacaaaaacaaattcttttaattcaacgggtgctttacataatgaaaaaaccacttgtggcacacgatgggcatctaacatcatcatcttctaatgtgttggagattttcatttcaaatatattttttaaattactctattttccaaaacacgtaatgcatttttctcgaaaataccttactgtaaaaataactgtcgcgtacacatgtgtgaagtagctagaacatactgaattttttttgtactgttggactctattcagtgtcatgtcctatatctgatcaagttatcaaggagataattctagaatgaaaaagaaaatcctcttgttggaaacaaaagacgttttatatgtgcagtatgacaaagaggagtttcagagacaactttgaatccttgtcagcctggagaccagcaccagaggaatctacaaggcaaactcccatatatttgcttcccccaaattgctgcccctacagactcaaagctctttttctttgttttgttgtttctctaaaaatttactgttctttgtcgatgctatataagccagggagttctaagacgccagctctttgagatttgctcattcccctgtatttcccacatatatattacatatacccgctaataaatttatgtttgttttaaaaaaaaaaaaaaaaaactcgagggggg

SEQ ID NO: 181 - DNA, 1979 bp, Homo sapiens
  misc_feature (968)..(968): n equals a,t,g, or c
gctttgccagggctgagccgggctgcctggtgccctcaccgcccccgccawacaccaccatgcwgactcccggcctgcggaactcgtagtgcagcccctgtcgcctccccggcccctgctatcccacgcaggactggcttcggccgccggggccagcagcttgcracgtgtccctggggaggcggaatcgctgtgcgccctgagcccgggctcagcccttcgctttccagctgcgtcctgctcccggccgsccagggagcccagtggcgatgagggcactgctggcgctttgccttctccttggctggctgcgctggggcccggcgggcgcccagcagtccggagagtactgccacggctgggtggacgtgcagggcaactaccacgagggcttccagtgcccagaggacttcgacacgctggacgctaccatctgctgcggctcctgcgcgctccgctactgttgcgccgcggccgacgccaggctggagcagggcggctgcaccaacgaccgccgcgaactggagcacccaggcatcactgcgcagcctgtctacgtcccctttctcatcgtcggctccatcttcattgcgttcatcatcctgggctctgtagtggctatttattgttgcacctgtttgagacccaaggagccctcgcagcagccaatccgcttctcactccgcagctatcagacagagaccctgcccatgatcctgacctccaccagccccagggcaccctcccggcagtccagcacagccacgagctycagcttcacaggcggctycatccgcaggttcttctcagccatctggtttcctggtgtcaccccagtatttcgcttacccccttcagcagragcccccactggctgggaagagctgtccagactttcagttccagktgacacgcccaggccatgaatycacaactcagtcagatggcagacaggtggagccctgctnccattgccacatgcaattctgagaaaatttcccttgtaactgatcagtgtcwtggaggagcatgctaggaaaacacagcaccttctaatttgaaagttcctgtctccaatcacagaaaggctaaaccagagaactgtttctggttttgcaaacatgtgatcattacatttcaatctatgctacttttattcaaaatatgcagcagtttgactttaaagttgcaaactggctaaaaacgttttactggacattcagctatattgcttagaaaagggctacatgtttctttttcatataagttgttcattgagttatgataggaatatattcataaataagcaaagaaaaatacctaattgtaattatcaaaggttcacttaaaaaattaactattaggtaaacttaagggggcagtgaaaaatctatttatgatttcgggagtaacctaaccatgaataatattagcatwatgagamcatttmctttttaaataaatamctaaatttkgtttacaaymggagttttyccagaatacaaggttycaataatcacatgaggagtttaaagttttaaatatatactcagacattcattgtaacacagagtgtatgtaaaatcatttcccccactcactggagggagtatttattgcagactttttgttcagcaacatttagtgtttcagtgaaagttggacagttggggcttaaaacatttatttgtaaaatgagctatgttcaaatgtaaatatttgtaatttaatgtatttaccmcattgactgtactaattatttagtagtcatactgtaatttttatgttaataataactggagttcaaagtctagctattggtataatcatctaatattatatatatctccagtgcccctgaattttatgtttgatgactatatatttgggcatatatcttgttggattagaataaataaaacactttatattttcatgaactctaaaaaaaaaaaaaaaaaaaaaaaaaaaaaaaaaaa

SEQ ID NO: 182 - DNA, 2087 bp, Homo sapiens
  misc_feature (1)..(1): n equals a,t,g, or c
ncccacgcgtccgctgttgctcaaaggaaataggagttggtgtgcttgtgaccaaggggttacacttccagcttttaaaattctcctttacatgtgctcagtgttttgttttgtgttttggtttctgttttttattttaattcccacattgggcacaagaatcagaatatggatagctagtttaagaaacttttgtgggtgcactgtagcatagatgacagaatttgatgttccccccatctccaattcagttcagggcattccacagttaaacagaaatgggaacgtggggctcttataaatgaaatgggcgctcacagttttggttttcagctcttcatgtctgtaagtgtgctttgggggaggctatgtctgtatggtcgattctcagttatcacatttgcctctcctcccactaccttcatggacattcagtgctgtttcgcactgcagttagagagaagggacggacagttggtgacactcagccacattgctacttttatctgttctggtaagaagttagatagatggtagattgaagcaattgggtagaattagttgggggaatatttatgagttgctgtgtttgttgattagttccatctctttcccattttaactgagaattgattatatatagctctaagtatataggtatttaaacaaccccacaagcggctgtatcagtaacatttattaattccactatagtgagggaggatttccattctaaataccttattttgagggatttataaaacttagttgtaaaagagaaagcccacatagtgggaataaattgcttcagccatttttagtatttgagagcactagggaagatgtttagtagctgtgtggatgccttttttcacaccctgtctattgaatgctgcatccattcacgaagttaaatgttacatgcagttagtccttaatgtggactggatctgtacttttgttttggattaaaacatttaaagatttttgaagtgcagctactccccacgtggcatttgatacacataaaagtcatactgtgtgtgcacaaagagtacatggattttccagcatattgctttaaaaaattatataaactgttaaaatattaacacctcaggctacctgctgtattctgtcccattgacccctggaattggatttactgcaagtgattgataattcaattatgtggcttttcccctttaatcttgccatttaaattacagtagaaagacaaaatcaagtaaaataaagtgttagataatagaaagagtgttaagaccagcccacttttctcatgtttatgttctttcatttggaccaagaatctccgcatggaggttgatttgccactggggactttggctaagactattaggtttgctttcaactagatgttcctgagacaagcagagggacactgcaattccccttccatgcctgctgttctcccccatgtaagtcttctttgaaattaacggatgtgtctcctttggaacagccccataacaaaagagaactactgatctgagcataggaaagtagaggctctaccacttttcagttgaaaaagcaagactttctctgtgtttctgaaacaaggcataatgttgtcacagaatcagagatccagtctcacttttccacaaatctccaaatctccagtcttatcttgtgtgctctaatggtttggttcaatccctttccaactcttgttttcaaagcatggggcctgagtgttctccactcctcctaagaaaggagcttgggtggaagggaccatgctgacctcctccatcagagggctcttccagtagtattctcggatgcaacctccatttctcagttaccattatttcctgtatcagctttgtccttcctggagggatgcacagtgatccggcccaccactgttgttgtcttgtgcttctgctctttcctatggtttcaggttattttctgggtttcccctattcttcttttatttccttttttttttatatttgctttcctttctactgcttttagatttgcaggagatgcaagtttcagctcaatgtttggcttctctcaatatggaaatt

SEQ ID NO: 183 - DNA, 1811 bp, Homo sapiens
  misc_feature (21)..(22): n equals a,t,g, or c
  misc_feature (37)..(37): n equals a,t,g, or c
aactaagtggttcccccgggnntgcagaatttsggcncaagccagaccaggagtgtccagtccttgggccttggtcagcctggagcagttgctcggccccctgtggtgggggcactatggagcgacatcggacttgtgaggggggtcctggggtggcaccatgccaggcccaggacacagagcaacggcaggagtgtaacctgcagccctgccctgagtgcccccctggccaggtgcttagtgcctgtgccacctcatgcccgtgcctctgctggcatctgcagcctggtgccatctgtgtgcaggagccctgccagcctggctgtggctgccctggagggcagctgctgcacaatggcacgtgtgtgcctcccactgcctgcccctgcacccagcattctctgccctggggcctcaccctgaccctggaagagcaggcccaggagctgcccccagggactgtgctcacccggaactgcacccgctgtgtctgccacggtggagccttcagctgctccctcgttgactgtcaggagtgccccctggggaaacgtggcagcaggtggccccgggggagctggggctctgcgagcagacgtgcctggagatgaacgccacaaagacccagagtaactgcagttcagctcgagcctcgggctgcgtgtgccagcccgggcacttccgcagccaggcaggcccctgcgtccccgaagaccactgcgagtgctggcaccttgggcgtccccacctgcctggatctgaatggcaggaggcctgtgagagctgcctctgcctcagtgggaggcctgtctgcacccagcactgctccccactcacctgtgctcagggcgaggagatggtgctggagccagggagctgctgtccctcttgccgcagggaggctccggaggagcagtcgccctcctgccagctcctcacggagcttygaaacttcaccaaagggacctgttacctggaccaggtagaagtgagctactgcagtgggtactgcccatccagcacccatgtcatgccagaggagccatacctgcagagccagtgtgactgctgcagctaccgtctagacccggagagccctgtgcggatcctgaacctgcgctgtctgggtggccacacagagcccgtggtgctgccggtcatccacagctgccagtgcagctcctgccaggggacggggtttcgccatgttgcccaggctgttcttgaactcctgggctcgagtgatccacctgcctcagcctcccaatgcgctggggttacaggcaggaaccactgcacccagccccctgacctcatcttttaagcaaggctgacattgctatgcaggcttgttgggtggacttggtgagggcacgcgtgtgaagtggctggcaggtgcctagttctgttaagcacctgccatatgataacctgaggtcccactgtgtggcagatgaaggggaaacagaggtggaaggcacccgtgccacctgggtggagcacagtggaaggcctggtgttggctctgggcgtcctcctggcaccagcctgaccactctgcctctcttactaacccatctctccctcacgtgtcccctgggaggtgacttctcaaagcgctaacaggctccgctgggtgagtccacagctgtccctcttgtgatcatgggactcagcagcactgaccacgtccttccacgctctctcacctgcccccaactgggggcccatgacttggcattagcatgttccaaataaagtgatactggcaacaaaaaaaaaaaaaaaaaaaaaactcgagggggggcccg

SEQ ID NO: 184 - DNA, 1118 bp, Homo sapiens
  misc_feature (482)..(482): n equals a,t,g, or c
gataaattttgaacaccaggactctgaaaaagtttaagcatatatatgagaaatttcctgaaatgttgtatgtattgtcttgtcttcttaaacagaagacactgaacagaatggaatctttggttgatctctaaggaccaccattttgaggatctcttataatgtatgatgacatttttcggttcccacattttgctttttctgttttgccctttgaaagcaggccatcgtcatttggtcagttcctcctttcttactgtggctgtgtccatctctaaggggccattcttccactctacagctcaaaaaagaaaatccaggaaacagcttcccaggcctgccttcctggtccccctcagttcccaaaacacacaaaccaggacaaaacaccacttcagttttctgcatcttatagtcttacaaccttgagtttgggaggatcttgactcaagagtcagatggtgaaatatctagtacttganccccttgtgtgataatgtcaagagaactaaggtttggtcccagacccaacaataactaccaataggaatctgggtagcatcttttaaattctttagtcttcagtcttatctgtaaaacatgggactggtctagataatttctccaactccaaaattcaatcatgttcttaatattaaaaatcctcatgtccatagatttttgtattctctccctggtaaatcctggtaatttcacagggatgtttgaaactgaaaaatcctgggaaaagtagattttagtcaagtccactccaatttaaaaccatactgaagtaccattttcactcataattataaattaaaaaatgacactatcgagggttgataagattatagagagatggctattttcatgttgccagtgagaatataaaattcccatttggggaaaaaatttatactatctattcaaaagttatatgcacttaatctatgacttgacaattccatttctcatgttcattttggaggattactgacacatatcctatgcaagaatgtgattgatagcattgttttcatttgagaccagcctgggcaacatagtgagaacctgtctctacaaaaaatttaaaaaaaaaaaaaaagggcggccgc

SEQ ID NO: 185 - DNA, 830 bp, Homo sapiens
ggcacgagtaaggactgtgttctttatgcatttcttgatccaggcatggcagttcctcttttcctgtacatattcacactcctgccacttctaccctttctcttatccctctgcttttcacctctgactgtaaaaagaagtagcagttccgaaagcaagagttccctatgaacacggaagaagacattggcaacttttgagtacaacaactatatttaatagagtaatttaagaacatcagccagtgaattttatacaagatagtgaaagagaaaaggaagattaattaggggtagtttaggatgccattaaatagcctagaattaggggagtagtcgttgaatagaaaggaggccacaaatttgagggatataagctaagaattggtaagccaagaagaaggaaaaggtttgggcagtaaggataatgaggaacaaaatagagaactcagaagcaatatctgactgttatcattggaagaatttttttgcttgcttgaggctggatattgaagtggatcaggatacttgagtgactatctgatgggcttttggaactagctctcaagaggtgaaaattagcttttttttctttttctttctttttttttttttttgaggcaaggtctcactgttgttgaggctgaacctcctgggctcaagcagttgtcccattgcagcctcctcagatactctgtaagccaaggcagggggaatattttgtgctcagtagtttgaggctgtggtgagctaagatcacactgctgtgctcacttcagcctgggcaacacagtgaaaccccgtctccatctgtttaaaaaaaaaaaaaaa

SEQ ID NO: 186 - DNA, 1939 bp, Homo sapiens
gaacacaaacatgcagtctgtagcagatggtaataggctgayatattacacttgttgatgtaaatctgataggtttctttctctccaaggacagctttttaaatatttaacagtatcaataatttttcagtttctgtgagaattttataatttataatttgcagacttaatgtataatctattttgtcctaacaattacaaatatattttttatttcagattrtatatattcctaccagatggagataattacagctttaaaaatttttattttttcattttatttcacacattgacattaaatttttatggacacataataactgtacatatatatggggtagaatgtgatgttttaatacatgtactcaatgtgtaatgatcaaatcagggtaatttgcataatgatttttctgtagggagaaaattcaaaatctactcttctggctattttcaaatatataatatgttattgttaactatactcatcctactatgcaataggacaccagaacttattcctgggttctacatccgttaaggcaaccaaggattggaaatattggaaaaaaaaattgcgtctgtactgaacatgtacagacttttttcttgtccttattccttacacaatatagtacaataactatttgcatgacatttacatcggatattatgagtgatctagagttgatatgaagtatatgggaggatgtgcaaaggtgatgtgcaaatactatgtcattttatatcagggacttgagtatcctttgttaycctcaggagatcctgaaacyagtcccccatggatactgagggctgactgtatagtcctatcctcacggaactttcattctaatgrgggaagactgactataaacaaaatatatgtaataggtggtggtaagtaccgtggagaagtaacaaatggggcaaagtgagttatacagctccatycttagaaaccttggagtacttttcttagtttatactcgtggtggtttccttttgtctcctttattacatgggactctgacatgtgcccatagctagggtggcagtaggatctacccgaaaagcgtcctgctgatacaggaccaaagcatcctgttgttctcgagcctataaaaagagctaatggtcttgcttctcttaactgtggcctcctacactgtgttttggatgattggtgatgtcttggatattctgtttctttggaactttgaatatacaacactttactagggaattagcaatggaagcagagcaaagatgtacagaggaaacaatgcrtaactctgatggaattgaagtcatgaggcagcagagagcttaaattasagctttaaaaatttttattttttagagggaatttamttgggagtaacagcagtaatagttaacggagccagaatgcttgagtcatataattgcaaagcagagttgggagcaacagatgctaaagagtagttgctgtagttcctctttgggtcgtaggagcagttgtcatrttmctatayagctactgcatgaagaagagttcttagtgaggcctgggtgaacagctcttcttagtattctgtgtgaccccattygaccttttaacaaatccctaagtaaataaatagcccctmaggwaaactaagtttttctctgctgtttttttgcttgagagagctataactgtaatagacttatatttctgaacattttagtgcttgccaatatttggtaatatttatgtttcctatatttgtaatgaacattcttcttcmggtacatttyttgttaaattattgtttsatgsataaaagttcaccttttattgtataaaattgactcagattaatttatacacattgacaatgggtaaatagagtttttcagattattaaaagctgaaggatgcccatgtaagcaaaaaaaaaaaaaaaaaactcga

SEQ ID NO: 187 - DNA, 739 bp, Homo sapiens
  misc_feature (649)..(649): n equals a,t,g, or c
gctggactcagagctctaacgacagctgcctcaaaaagaaaataacatcccttgttcatgcttgccagaaaacggcagcagaagcaggcccaagggcatcctctacctcctggcattcatttttgcctctgtcatctcatgcaggtgtgtctgcttggtggaaactgggtttcacaacagagtccaagatgtaaaggagtttggaaaatgtctaatgtggcttttgatgtatgtaagggaaatatttaaggcaatcctattgtaaatgagagaggataaagggatacaatgggagttaagtgtgctgcagttcactcgaactggtaaaatgtcagccccagttgactttgataaattatgcatatgccagctgccccagtcacagtcttgaagctcttgccctttccttgtgtgtgtggtttaggatgggttcccattggctgtgtttccatcccatctcatctcaagggaaatctctgctgctcctgagcacctcgtgtcatagattttatactcttacagacttggaatgcagtagaggtatgtggawttttaggggtttgtttttttaagaataagtaacaagaaataacacatttcttaataatagcttttttgacatagtttggagtctgattatatggtacanttttctaccagtaatatagggttgccaataaatagaaaakgttttctaaaaataaattttattacaacaaaaaaaaaaaaaaaaactcga

SEQ ID NO: 188 - DNA, 2410 bp, Homo sapiens
ccacgcgtccgcttcgacgacgacacctgcagaagtgcggagcccgccatgccgcgccacctctcgggactgctcctgctgctctggccgctgctgctgctgctgccgccgacccccgccgcccccggccccctggcccgcccgggtttgcggaggctgggcacgcggggcccagggggcagtcccgggcgccgccctgtctctgctgtccccacccgcgcgccctattccggggccggccagcccggcggggcccgaggcgcaggtgtttgcaggagcaggcccttggatttggtgttcatcatcgatagttcccgcagtgtgcggcccctggagttcaccaaagtgaagacctttgtctcccagataattgacactctggacattggggcggcagatacacgggtggcagtggtgaactatgctagcaccgtgaagattgagttccatctccagacccactcagataaacagtccttgaaacaggctgtggctcggatcacacccctgtctacaggcaccatgtccggcctggctatccagacagcaatggatgaggccttcacggtggaggcaggagctcgggggcccacttccaacatccctaaggtggccatcatcgtgacagatgggaggccccaggaccaggtgaatgaggtggcggctcgggcccgggcatctggtattgaactctacgccgtgggcgtggaccgggcagacatggagtccctcaagatgatggccagcgagcccctagacgagcacgttttctatgtggagacctacggggtcattgagaaactctcctctagattccaggaaaccttttgcgctctggacccgtgtgtgcttggcacacaccggtgccagcacgtgtgtgtcagtgatggggaaggcaagcaccactgtgagtgcagccaaggctactccttgaacgccgatcagaagacgtgttcagctatcgataagtgtgctctgaacactcacggttgtgaacacatctgtgtgaacgacagaactggctcttaccactgtgagtgctacgaaggttacaccctgaaccaagacaggaagacttgttcggctcaagaccaatgtgcctttggtacacatggctgccagcacatttgtgtaaatgacagagatgggtcccatcactgtgaatgctacgagggttatactctgaatgctgacaacaaaacgtgttcagttcgcagcgagtgtgctgggggctcgcacggctgccagcacctgtgtgtggacgacgggcccgcggcctatcactgcgattgtttccccggctacaccctgaccgaagaccggaggacgtgcgcagccattgaagaagcacgaagactcgtctctacagaagatgcttgtgggtgtgaagccaccctggccttccaggagagggccagctcatatctgcagagactgaatgccaaactcgatgatattttgggcaagttgcaagcagatgcgtatggacaaatacatcgttgaattactcagatttttcacctggatatacggagagcttggtctatttaatatttttgcatacttcaatgttcctgctaataatttgccattgcaaatgctttaatattactggataagtagtatgaggatcttctagagaatcagtaggacataaacgttcacatccttaagagcaaactttagtgtctctaagctatgactgtgaaatgattcatggggaatagaatgaaaagtttggtatctctttatttaccaattgagccatttaatttttaaatgtttatattagtaagataaccattcttacaatgggaactttttatctattttctcttgatagtatttatagtataaaccagttttattattgagagtgtaaattatacaagtatttacacataaaaaagttcatataattgaggtaaatataatttagaactgtttctttaatgctttgttttttgctcactttttgctggaatatcactgaagctgtgatcaggggattataacacatatcaagatcaagtgaacactacatgaaatattgtaagaaacacataactaaagactttagttttgaattaagtgttataacttcttaccaagttttggtaaaaaatcctacattatctttactgtttcactttaggattcaatcaagaaaattatatacttataaatattgatctaaaaagttaacaacaaacccaatgtcgccattttaaagtttaagcttaacttttcttcacttacatatttagtatatgtattttatttttccgcttgaaagcttatagctcttaggagaaaaccatcctttaaattgtgactactcattttttctgtttgtattgtctttagtataataaaaagttactatctttataaaaaaaaaaaaaaaaaa

SEQ ID NO: 189 - DNA, 3369 bp, Homo sapiens
ggattcgcggccgcgtcggaccttccgcggaccgggcgacccagtgcacggccgccgcgtcactctcggtcccgctgaccccgcgccgagccccggcggctctggccgcggccgcactcagcgccacgcgtcgaaagcgcaggccccgaggacccgccgcactgacagtatgagccgcacagcctacacggtgggagccctgcttctcctcttggggaccctgctgccggctgctgaagggaaaaagaaagggtcccaaggtgccatccccccgccagacaaggcccagcacaatgactcagagcagactcagtcgccccagcagcctggctccaggaaccgggggcggggccaagggcggggcactgccatgcccggggaggaggtgctggagtccagccaagaggccctgcatgtgacggagcgcaaatacctgaagcgagactggtgcaaaacccagccgcttaagcagaccatccacgaggaaggctgcaacagtcgcaccatcatcaaccgcttctgttacggccagtgcaactctttctacatccccaggcacatccggaaggaggaaggttcctttcagtcctgctccttctgcaagcccaagaaattcactaccatgatggtcacactcaactgccctgaactacagccacctaccaagaagaagagagtcacacgtgtgaagcagtgtcgttgcatatccatcgatttggattaagccaaatccaggtgcacccagcatgtcctaggaatgcagmcccaggaagtcccagacctaaaacaaccagattcttacttggcttaaacctagaggccagaagaacccccagctgcctcctggcaggagcctgcttgtgcgtagttcgtgtgcatgagtgtggatgggtgcctgtgggtgtttttagacaccagagaaaacacagtctctgctagagagcactycctattttgtaaacmtatctgctttaatggggatgtaccagaaacccacctcaccccggctcacatctaaaggggcggggccgtggtctggttctgactttgtgtttttgtgccctcctggggaccagaatctcctttcggaatgaatgttcatggaagaggctcctctgagggcaagagacctgttttagtgctgcattcgacatggaaaagtccttttaacctgtgcttgcatcctcctttcctcctcctcctcacaatccatctcttcttaagttgayagtgactatgtcagtctaatctcttgtttgccarggttcctaaattaattcacttaaccatgatgcaaatgtttttcattttgtgaagaccctccagactctgggagaggctggtgtgggcaaggacaagcaggatagtggagtgagaaagggagggtggagggtgaggccaaatcaggtccagcaaaagtcagtagggacattgcagaagcttgaaaggccaataccagaacacaggctgatgcttctgagaaagtcttttcctagtatttaacagaacccaagtgaacagaggagaaatgagattgccagaaagtgattaactttggccgttgcaatctgctcaaacctaacaccaaactgaaaacataaatactgaccactcctatgttcggacccaagcaagttagctaaaccaaaccaactcctctgctttgtccctcaggtggaaaagagaggtagtttagaactctctgcataggggtgggaattaatcaaaaacckcagaggctgaaattcctaatacctttcctttatcgtggttatagtcagctcatttccattccactatttcccataatgcttctgagagccactaacttgattgataaagatcctgcctctgctgagtgtacctgacagtagtctaagatgagagagtttagggactactctgttttagcaagagatattttgggggtctttttgttttaactattgtcaggagattgggctaaagagaagacgacgagagtaaggaaataaagggaattgcctctggctagagagtagttaggtgttaatacctggtagagatgtaagggatatgacctccctttctttatgtgctcactgaggatctgaggggaccctgttaggagagcatagcatcatgatgtattagctgttcatctgctactggttggatggacataactattgtaactattcagtatttactggtaggcactgtcctctgattaaacttggcctactggcaatggctacttaggattgatctaagggccaaagtgcagggtgggtgaactttattgtactttggatttggttaacctgttttcttcaagcctgaggttttatatacaaactccctgaatactctttttgccttgtatcttctcagcctcctagccaagtcctatgtaatatggaaaacaaacactgcagacttgagattcagttgccgatcaaggctctggcattcagagaacccttgcaactcgagaagctgtttttatttcgtttttgttttgatccagtgctctcccatctaacaactaaacaggagccatttcaaggcgggagatattttaaacacccaaaatgttgggtctgattttcaaacttttaaactcactactgatgattctcacgctaggcgaatttgtccaaacacatagtgtgtgtgttttgtatacactgtatgaccccaccccaaatctttgtattgtccacattctccaacaataaagcacagagtggatttaattaagcacacaaatgctaaggcagaattttgagggtgggagagaagaaaagggaaagaagctgaaaatgtaaaaccacaccagggaggaaaaatgacattcagaaccagcaaacactgaatttctcttgttgttttaactctgccacaagaatgcaatttcgttaayggagatgacttaagttggcagcagtaatcttcttttaggagcttgtaccacagtcttgcacataagtgcagatttggctcaagtaaagagaatttcctcaacactaacttcactgggataatcagcagcgtaactaccctaaaagcatatcactagccaaagagggaaatatctgttcttcttactgtgcctatattaagactagtacaaatgtggtgtgtcttccaactttcattgaaaatgccatatctataccatattttattcgagtcactgatgatgtaatgatatattttttcattattatagtagaatatttttatggcaagatatttgtggtcttgatcatacctattaaaataatgccaaacaccaaatatgaattttatgatgtacactttgtgcttggcattaaaagaaaaaaacacaaaaaaaaaaaaaaaaagggcggccgctgcgcgatc

SEQ ID NO: 190 - DNA, 3530 bp, Homo sapiens
  misc_feature (30)..(30): n equals a,t,g, or c
  misc_feature (59)..(59): n equals a,t,g, or c
  misc_feature (79)..(79): n equals a,t,g, or c
  misc_feature (3465)..(3465): n equals a,t,g, or c
  misc_feature (3471)..(3471): n equals a,t,g, or c
  misc_feature (3485)..(3485): n equals a,t,g, or c
  misc_feature (3487)..(3487): n equals a,t,g, or c
  misc_feature (3505)..(3505): n equals a,t,g, or c
gacatgaagccaaccggcacccggccccanatttgttataacagtactctaatttgaanccatgataaaaataaccatncatttgtaaatccacagaggaccctggtgaattcctaacacatattttctgtcttgttaagctgttgaattgcatcatggtggagaaatgtgtaaatagaagtaatgatcttggtgtttgtaaaaggggtatttgaaaggttcccgaaagtgtgagggggctgatagcagatctgcagcttctccccccgtgcactaaagccaatcataattctttctacctggtttgtgtcatcctccattaggagaccccatcttcagaaccaatggaggaagaggaagatgacgacttggagctgtttggtggctatgatagtttccggagttataacagcagtgtgggcagtgagagcagctcctatctggaggagtcaagtgaagcagaaaatgaggatcgggaagcaggggaactgccgacctccccgctgcatttgctcagccctgggactcctcgctccttggatggcagtggttctgagccagctgtctgtgagatgtgtggtatcgtgggtacaagggaagccttcttctccaagaccaagaggttctgcagcgtctcctgctccaggagctactcctccaactccaagaaagccagtatcttggctaggttacagggaaaaccaccgaccaaaaaagccaaagtcctgcacaaggctgcctggtctgccaaaattggagccttcctccactctcaagggacaggacagctggcagatgggacaccaacaggacaagacgctctggtcttgggcttcgactgggggaagttcctgaaggatcacagttacaaggctgctcccgtcagctgtttcaagcacgtcccactctatgaccagtgggaggatgtgatgaaagggatgaaggtggaggtgctcaacagtgatgctgtgctccccagccgggtgtactggatcgcctctgtcatccagacagcagggtatcgggtgctgcttcggtatgaaggctttgaaaatgacgccagccatgacttctggtgcaacctgggaacagtggatgtccaccccattggctggtgtgccatcaacagcaagatcctagtgcccccacggaccatccatgccaagttcaccgactggaagggctacctcatgaaacggctggtgggctccaggacgcttcccgtggatttccacatcaagatggtggagagcatgaagtacccctttaggcagggcatgcggctggaagtggtggacaagtcccaggtgtcacgcactcgcatggctgtggtggacacagtaatcgggggtcgcctacggctcctctacgaggatggtgacagtgacgacgacttctggtgccacatgtggagccccctgatccacccagtgggttggtcacgacgtgtgggccacggcatcaagatgtcagagaggcgaagtgacatggcccatcaccccaccttccggaagatctactgtgatgccgttccttacctcttcaagaaggtacgagcagtctacacagaaggcggttggtttgaggaagggatgaagctggaggccattgaccccctgaatctgggcaacatctgcgtggcaactgtctgtaaggttctcctggatggatacctgatgatctgtgtggacggggggccctccacagatggcttggactggttctgctaccatgcctcttcccacgccatcttcccggccaccttctgtcagaagaatgacattgagctcacaccgccaaaaggttatgaggcacagactttcaactgggagaactacttggagaagaccaagtcgaaagccgctccatcgagactctttaacatggattgcccaaaccatggcttcaaggtgggcatgaagctggaggccgtggacctgatggagccccggctcatctgtgtggccacggtgaaacgagtggtgcatcggctcctcagcatccactttgacggctgggacagcgagtacgaccagtgggtggactgcgagtccccagacatctaccccgtcggctggtgtgagctcaccggctaccagctccagcctcctgtggccgcagaaccggccacaccgctgaaggccaaagaggccacaaagaagaaaaagaaacagtttgggaagaaaaggaaaagaatcccgcccactaagacgcgacccctcagacaggggtccaagaagcccctgctggaggacgaccctcagggtgccaggaagatctcgtcggagcctgttcctggcgagatcattgctgtgcgtgtgaaggaagagcatctagacgtggcctcgcccgacaaggcttcaagtccagagctgcctgtctccgtcgagaacatcaagcaggaaacagacgactgagccttcctgcctccagcctggcttctagctggaagccagcccagcgtttctctaccaccaccaccatgcctccacctgactttggcttggagactgatcctctctgtgtaaattctgcccggtgctgtgaaggctggacggtggaggacctgctggggtctcctgggacccgcctgttgcttctgccctcccctgtggaaaggtctatatgacgggccgcctgaggccccagaactcgtctgtgaaccaccttttccagccagagttcccaaagctggaacgctagctgcctgctcttccttaagatggcctccccccgacccgccacggccctcagttgccagggatggggccaccactgtcacactgtggaatacaagacagtgaactctgtctgcctgaacgagtcatgtaaattaagttctagagcagctctctgagcaggataaggtcccctgacagtgagttgtgtggtgggggcagcctctgcctcaaaaattcaccaagcagaatgcctctcagcctcatgtgttggtcctctgctcctcctagctccccagggatgttggggacccagcttgtctcggcagctaagaagcagtgaccaggatgtggattttggcgacctgtgtggtggccttgagctgctttctgtgtttgtgaggactgactcccatttcctaaaggaaatgcccccggggaggacattgggaggaagatggcctgagtgtgcactttggctctgctacctgctcctgaagccccgctaaaaataattcatccaagattcctttgtagttaaagggtccagttctgactggagcctctagagagctgggcttgtatgttcttttggccttttgttcctacctaaatgaagaaaccatgcctggaggggccgtgaacacagaaccctcaagacaaggatgacagagctggaggacacatctagctgccattgcaacctcactgggctccccagactctgtgtgtgagaaattaaaccccctgcttgcttgagtcccgtttgttaaggattcttctattnccttgncagatttgtgttcngnaccccacccccccacctngtggtattcggttcagaaagggcca

SEQ ID NO: 191 - DNA, 1145 bp, Homo sapiens
  misc_feature (386)..(386): n equals a,t,g, or c
aattcggcacgaggacatattggccatttactctactaataaaagagtactatctactcagtgtcatttactgttactgtagtaattaatgcctttggaagaatcttttgaaatagttctcaaattggtaccactacttggtttggaattatttttttttcttttcataatcaatggttatataaatgtatattgtcctagtcagtattttatatatgctaaggactcactagctggcttggcactaatacctcaataaaaggaatacttcttttggaatcatgaaacaaaagtgartaaacctccaagttatttttccaaccaaccttctttgaaaaatcttggatgagtcactcaaatcaagacatgttataaaattatctgtnattttggtagaacatatacattgtyctaataataatttycaaatattcagtgkaacygtaagkatgagaatacaggttgaatatcycttatccaaaatgcttgggaccagaagtcttttggattycaaatttttaaatatttacatcatacttaccagtttaacatccctaattcaaaaattcaaaattcagaatgctccaataatcgtttcctttgascatcatgtcagtgctcaaaaagttgcagattttgaggtatttcagatttttgaattaggaagactcaacttgtactatcattctatagactttatgattgggtagactacatgagtattgaacccagaaatcattgtctagcaaaagccagtatagtgattaattaccctgtgactattatataatgttcaaaaaagctaacatattagaatgtccttagcgtgcagagagcaaacagagacaaaaagaaaagttaccctgaaaagtttgtcagaaaaatagaatatcagacgctraactactcatccagaattttgtcraaaaagaaaaataagataaaattcactggtagacaaaaagtagtaacataccagtttgtaatttctcagtttcaaaccatgaatatgtatttgtataccaaaaatcatttcaggagtcagagaaggaggatatgccttttatgtggagactttaaacataaaattggaaaaaaaaaaaaaaaaaaactcgtagggggggtcccgtacccaatcgtcctgt

SEQ ID NO: 192 - DNA, 2214 bp, Homo sapiens
gcagtcgcagcatgctttccgaggaagccggtgttgccgagattgccaaaatgctttggagtttttaactgaatctaagaaaagtccaaaatagatttgagactgtaaaaacagaaactgcagcaagggggattcagtgccaatgcatcaacaaaaaagacaaccagagttagtggaaggaaatcttcctgttttcgtgttccccacggagctcatattttatgcagatgatcagtcaacacataagcaagtgttgacactgtacaatccctatgagtttgccttaaagttcaaagttttgtgtactactccaaataagtatgttgtcgttgatgctgcaggtgcagtaaagcctcagtgttgtgtggatattgtgattcgtcatcgagatgttcgatcctgtcactatggtgtaatagacaaattccgtctccaagtttccgagcaaagccaaaggaaggctttggggaagaaaagaggttgttgctactcttctcccatcagcaaaagaacaacaaaaggaagaagaggaaaaaagattaaaggracatttaackgaaaktttattttttgagcagtcgtttcaaccaggtcttatcacaatggccatacttagaacatgagcaaggatttcaattgacttctgaagtaaatctgtcttgaaaatatgaatgtggactgccttttatctctatttcactccattaacatgcaacaaactattgaatgatttcaaataattgcaaatgtataatatatattttaaattataatttaatttgaaggactgcagaacattattttacagacagcaaggatgcttctgagtgacacctaggaaattatttgaagaaattctttttatatctayacctgttgtgtaagaaactttaaaacattkgttattttctcacctttttttctaattcactttgattgctaggggtcatgtatgcttcgaagttacaggactaaaagagcaaactgaccggcctaaaactaaaatgacatttattccctagctacaaacatcagcgttattatgttaattataccttgccctctatcattataaatggttgccatggtgtttctaaaaataagtgttttaccattaatgtgtagagggcaaacaaagcataaagtactaagggatcatgcttatcctagggtctcacagaagagaggacatatttaattaatcttgtgaattacagaacaggttgtggtccagacaccaagaatcataggggtttttttttaaaaaacctaatagaagtagggtgacctctctctttggtctaagagttctaaaggaaggtaggcatctgtttaattagttggttcaccctggctttacctctggttaatgctttgtgttaataggaaggaaaaatcactttatcttttcttccaagcccctccctgcctgacttacccagactgggattaccagataccaggtgatttatgtggagatgatttttcacctttaaactctaagccaagtgtaagaaactcttgatagctatgtctattttatatcagtcactgagacttttttttaagtttttatttattattaagacaactttgccaaaaaagtcccctaagcacaactatttacatttctttatagcctcttctgatctctaacacatatgcagttttaactgttattttcatagtaactgatcttttgtctaaggatttttacctgaaagcacaatgtattgagtctcttgaaaatcatctttcagatctttttacagaatgaacttatgcactgctactgtagtattctcaaggaatatatgtaaacacaaatgtatgcctgaggttggtttttgcagaaaacagtctctgcttctaaaaacttctatgtctagtcttccataggaaatcctcactgtttaaccatgtgaggagcctaagtcattaaacggatcatgtctgtacattgtgtaatgaatgaaaagcacataaatgtaatctactttgaactttgtaaaaatgatgtgtggaggctattcttgtttctccatctcaagtcctgtgtgtgcacgtgtgtgcaagtgcacatgtgtgtgtgtaataacacattgtaaagaacagaaattactttaaaaaataaacagaaatggagacctgaaaaaaaaaaaaaaaaaaaaaaaaaaaaaaaaaaaaaactcgagggggggtcccgtacccaat

SEQ ID NO: 193 - DNA, 4712 bp, Homo sapiens
catggtacgcctgcaggtaccggtccggaattcccgggtcgacccacgcgtccgcccaygcgtccggcggctccgagccaggggctattgcaaagccagggtgcgctaccggacggagaggggagagccctgagcagagtgagcaacatcgcagccaaggcggaggccgaagaggggcgccaggcaccaatctccgcgttgcctcagccccggaggcgccccagagcgcttcttgtcccagcagagccactctgcmtgcgcctgcctctcagtgtmtccaactttgcgctggaagaaaaacttcccgcgcgccggcagaactgcagcgcctcctcttagtgactccgggagcttcggctgtagcckgctmtgcgcgcccttccaacgaataatagaaattgttaattttaacaatccagagcaggccaacgaggctktgctctcccgacccgaactaaagctccctcgctccgtgcgctgctacgagcggtgtctcctggggctccaatgcagcgagctgtgcccgaggggttcggaaggcgcaagctgggcagcgacatggggaacgcggagcgggctccggggtctcggagctttgggcccgtacccacgctgctgctgctcsccgcggcgctactgsccgtgtcggacgcactcgggcgcccctccgaggaggacgaggagctagtggtgccggagctggagcgcgccccgggacacgggaccacgcgcctccgcctgcacgcctttgaccagcagctggatctggagctgcggcccgacagcagctttttggcgcccggcttcacgctccagaacgtggggcgcaaatccgggtccgagacgccgcttccggaaaccgacctggcgcactgcttctactccggcaccgtgaatggcgatcccagctcggctgccgccctcagcctctgcgagggcgtgcgcggcgccttctacctgctgggggaggcgtatttcatccagccgctgcccgccgccagcgagcgcctckccaccgccgccccaggggagaagccgccggcaccactacagttccacctcctgcggcggaatcggcagggcgacgtaggcggcacgtgcggggtcgtggacgacgagccccggccgactgggaaagcggagaccgaagacgaggacgaagggactgagggcgaggacgaagggcctcagtggtcgccgcaggacccggcactgcaaggcgtaggacagcccacaggaactggaagcataagaaagaagcgatttgtgtccagtcaccgctatgtggaaaccatgcttgtggcagaccagtcgatggcagaattccacggcagtggtctaaagcattaccttctcacgttgttttcggtggcagccagattgtwcaaacaccccagsattcgtaattcagttagcctggtggtggtgaagatcttggtcatccacgatgaacagaaggggccggaagtgacctccaatgctgccctcactctgcggaacttttgcaactggcagaagcagcacaacccacccagtgaccgggatgcagagcactatgacacagcaattcttttcaccagacaggacttgtgtgggtcccagacatgtgatactcttgggatggctgatgttggaactgtgtgtgatccgagcagaagctgctccgtcatagaagatgatggtttacaagctgccttcaccacagcccatgaattaggccacgtgtttaacatgccacatgatgatgcaaagcagtgtgccagccttaatggtgtgaaccaggattcccacatgatggcgtcaatgctttccaacctggaccacagccagccttggtctccttgcagtgcctacatgattacatcatttctggataatggtcatggggaatgtttgatggacaagcctcagaatcccatacagctcccaggcgatctccctggcacctcgtacgatgccaaccggcagtgccagtttacatttggggaggactccaaacactgccctgatgcagccagcacatgtagcaccttgtggtgtaccggcacctctggtggggtgctggtgtgtcaaaccaaacacttcccgtgggcggatggcaccagctgtggagaagggaaatggtgtatcaacggcaagtgtgtgmacaaaaccgacagaaagcattttgatacgccttttcatggaagctggggaatgtgggggccttggggagactgttcgagaacgtgcggtggaggagtccagtacacgatgagggaatgtgacaacccagtcccaaagaatggagggaagtactgtgaaggcaaacgagtgcgctacagatcctgtaaccttgaggactgtccagacaataatggaaaaacctttagagaggaacaatgtgaagcacacaacgagttttcaaaagcttcctttgggagtgggcctgcggtggaatggattcccaagtacgctggcgtctcaccaaaggacaggtgcaagctcatctgccaagccaaaggcattggctacttcttcgttttgcagcccaaggttgtagatggtactccatgtagcccagattccacctctgtctgtgtgcaaggacagtgtgtaaaagctggttgtgatcgcatcatagactccaaaaagaagtttgataaatgtggtgtttgcgggggaaatggatctacttgtaaaaaaatatcaggatcagttactagtgcaaaacctggatatcatgatatcatcacaattccaactggagccaccaacatcgaagtgaaacagcggaaccagaggggatccaggaacaatggcagctttcttgccatcaaagctgctgatggcacatatattcttaatggtgactacactttgtccaccttagagcaagacattatgtacaaaggtgttgtcttgaggtacagcggctcctctgcggcattggaaagaattcgcagctttagccctctcaaagagcccttgaccatccaggttcttactgtgggcaatgcccttcgacctaaaattaaatacacctacttcgtaaagaagaagaaggaatctttcaatgctatccccactttttcagcatgggtcattgaagagtggggcgaatgttctaagtcatgtgaattgggttggcagagaagactggtagaatgccgagacattaatggacagcctgcttccgagtgtgcaaaggaagtgaagccagccagcaccagaccttgtgcagaccatccctgcccccagtggcagctgggggagtggtcatcatgttctaagacctgtgggaagggttacaaaaaaagaagcttgaagtgtctgtcccatgatggaggggtgttatctcatgagagctgtgatcctttaaagaaacctaaacatttcatagacttttgcacaatggcagaatgcagttaagtggtttaagtggtgttagctttgagggcaaggcaaagtgaggaagggctggtgcagggaaagcaagaaggctggagggatccagcgtatcttgccagtaaccagtgaggtgtatcagtaaggtgggattatgggggtagatagaaaaggagttgaatcatcagagtaaactgccagttgcaaatttgataggatagttagtgaggattattaacctctgagcagtgatatagcataataaagccccgggcattattattattatttcttttgttacatctattacaagtttagaaaaaacaaagcaattgtcaaaaaaagttagaactattacaacccctgtttcctggtacttatcaaatacttagtatcatgggggttgggaaatgaaaagtaggagaaaagtgagattttactaagacctgttttactttacctcactaacaatggggggagaaaggagtacaaataggatctttgaccagcactgtttatggctgctatggtttcagagaatgtttatacattatttctaccgagaattaaaacttcagattgttcaacatgagagaaaggctcagcaacgtgaaataacgcaaatggcttcctctttccttttttggaccatctcagtctttatttgtgtaattcattttgaggaaaaaacaactccatgtatttattcaagtgcattaaagtctacaatggaaaaaaagcagtgaagcattagatgctggtaaaagctagaggagacacaatgagcttagtacctccaacttcctttctttcctaccatgtaaccctgctttgggaatatggatgtaaagaagtaacttgtgtctcatgaaaatcagtacaatcacacaaggaggatgaaacgccggaacaaaaatgaggtgtgtagaacagggtcccacaggtttggggacattgagatcacttgtcttgtggtggggaggctgctgaggggtagcaggtccatctccagcagctggtccaacagtcgtatcctggtgaatgtctgttcagctcttctgtgagaatatgattttttccatatgtatatagtaaaatatgttactataaattacatgtactttataagtattggtttgggtgttccttccaagaaggactatagttagtaataaatgcctataataacatatttatttttatacatttatttctaatgaaaaaaacttttaaattatatcgcttttgtggaagtgcatataaaatagagtatttatacaatatatgttactagaaataaaagaacacttttggaaaaaaaaaaa

SEQ ID NO: 194 - DNA, 813 bp, Homo sapiens
  misc_feature (283)..(283): n equals a,t,g, or c
  misc_feature (691)..(691): n equals a,t,g, or c
gcaggaatttctacctatatttccttccttactgtgttgtgtgtgtttgtatgtgtgtgtgtttaatttgtagcatttgccagtttctgtggtgtaaatactcccactacagctgttttcaagctaacattgtgataccacaaaaaatggaattgggaaggcacaatcaagattaacaagccagtttagaccaagacaatttttctgccctattagttgggcacaagttagaaaggctgatagtatctcatgttggaaaggtgagagagaaggccctcatgcnttattaatggcatatgcattgaagtgccctgtttgagggcatgctgttagtaacttttaaaatatgagatgtcatactttttgactgaaaatacaactcttgtaggattctattttatagaactacttaggtgcataaatatacaaaaataactgtcattgcagcattatttgtaatagtggaaacagaagacttttcattaataagagaatggttaggccagatccagtggctcacacctgtaatcccaacattttgggaatccaaggcaggaggatcgctttagcctaggagttggagaccagcatgggcaacataacaagaccttgtctctactaaaaaaaaataataataattagtctggcatggtggcacacctgtactcccagctacttgggaggctggggncaaggaggattgcttgagcccaggagattgaggctgcagtgaactgtgatcacaccactgcacaccagcctgggtgacacagcaaaactctgtctcaaaaaaaaaaaaaaaaaaaactcgta

SEQ ID NO: 195 - DNA, 1739 bp, Homo sapiens
ggcacgagagatcctcaggatatctttagccaaaggaaaagctccgcattcccacctggggggaaagctggattgccatgggcacgaagtagtggtgcagagtccctggccatcctgaatatccagaatggtgtttctgaagttcttctgcatgagtttcttctgccacctgtgtcaaggctacttcgatggccccctctacccagagatgtccaatgggactctgcaccactacttcgtgcccgatggggactatgaggagaacgatgaccccgagaagtgccagctgctcttcagggtgagtgaccacaggcgctgctcccagggggaggggagccaggttggcagcctgctgagcctcaccctgcgggaggagttcaccgtgctgggccaccaggtggaggatgctgggcgcgtgctggagggcatcagcaaaagcatctcctacgacctagacggggaagagagctatggcaagtacctgcggcgggagtcccaccagatcggggatgcctactccaactcggacaaatccctcactgagctggagagcaagttcaagcagggccaggaacaggacagccggcaggagagcaggctcaacgaggactttctgggaatgctggtccacaccaggtccctgctgaaggagacactggacatctctgtggggctcagggacaaatacgagctgctggccctcaccattaggagccatgggacccgactaggtcggctgaaaaatgattatcttaaagtataggtggaaggatacaaatgctagaaagagggaatcaaatcagccccgttttggagggtgggggacagaagatggggctacatttcccccatacctactatttttttatatcccgatttgcactttgagaatacatctaaggtcatctttcaaaagagaaaaattggacacttgagtgactttgtttttagttttgtttttgtacattatttatgtgattgttatggaattgtcacctggaaagaacaattttaagcaatgtcatttctagatgggtttctaattctgcagagacacccgtttcagccacatctaaaagagcacagtttatgtggtgcggaattaaacttccccatcctgcagattatgtggaaatacccaaagataatagtgcatagctcctttcagcctctagccttcactcctgggctccaaaagctatcccagttgcctgtttttcaaatgaggttcaaggtgctgctttgcatgcctgccaacccatggaagttgtttcttacttcttttctctcttatttattaaccatggtctgagagttgtttttgttctatgtaacagtattgccacaaaactataggcaaatcgtgtttgcagggagatttctgatgcctctgtgggtgtgtgtaagttaaagtggccacatttaagaaggccaagctttgtagtggttgcacagtcacactgatatgctgatttgctctttctcattgtatgtctatgctttgtcatcagtgctatagtaaattacaaagaaataggtagattgtatgaacatacccacaaatgcctatgatttaggttaccaatgtattctttctcatttggggttttgcttctgtctgtctgtttattggaaacttgtacttcaagtagggggaatcctaattctaataactccttagctaagttttattattcaggcaataaacatgttttcatgtaaaaaaaaaaaaaaaaaaa

SEQ ID NO: 196 - DNA, 1677 bp, Homo sapiens
  misc_feature (1012)..(1012): n equals a,t,g, or c
ggtgcagtggtgccatcacagttcactgcagccttgacctcccgggctcaagcaatcctcccacctcagccacttgagtagctgagacctcagatatgtgccatcacacccagctgattttttaaaattaattttttgtagagatagggtctcatatgttgcccatgctggtctcaaactactgggttcaaatgatcctcctgcctcagccttccaaagtactgggattacaggcatgagccaccatgccgggctgggaggcggaattttgttcagtctaaagataagctttttcatagctctggctgtagtgggagggagcagaggagtgaatgattgtcagttgggagggtgcagagtgggctcctgccctagggtgraggtragggtggcttaggtgasmcamcacagaggccctgttcagccccacgtcccctccctgtgctccctcctcctctctcctctcctgcaggcgtggraggtatcatcattcagcagatttcaccagaggcagtggaggaggcaggtacctgagccagaattcagaatgtcttattctccacttgactctgccactaacttgttgtgcaactttgggcctttccccaggccttcattttcttttcttttctttttctttytttttttttgaggcggagtctcgctatgttgcccaggctggagtgcagtggcgcagcatcatctcggctcactgcaagctccaccttctgagttcacgccattctactgcctcagcctcccgagtagccgggactgcaggcrcccaccaccacgcccggcttattttttgtatttttagtagagacagggtttcaccacgttagccaagatggtctcgatctcctgacctcgtgatccacccgcctgggcttcccaaagtgctgggattacaggcgtgagccactgcgcccggccattttcttaaatatctaataaaaaatatatagcaaatgcagtttttaaactacgacaatatgaccacgcaaaagantattatcttccaagactgctggtccaaggaaaagtcagtaataaagtggaagcattgtagcttatggaatgactggttasatttgggagaagccttagcaataatctagaatctgcatagataatacatctgaggattgggctttgtggtttacaaagcatttttttttcctcttttgatcccagccgtttgtctggactgatacaaagcatttttattagtttgtcttattcaatcctcacaccacctcaaatttacagaggatatggatctggttaatttgtatgactatgtaacctcatgtcagtccacagcactgcctggaggtgggtagaggtggtcctgggctggaatcccagccccagtgggaccttgagcaagttactttagctgtctgcacctaaatttcctcactggcaaaacaggaatactggtggttcacacctgcaattccagcactttgggaggctgaggtgggaggattgcttgagtccagaagttcaaaaccagactgggcaacatagcaagaccatctctacaaaaattaaataaataaaacatttacaagggttgtggtgaagattaaatgagatcactcacgaaaaagctcagcagaccctgatgtgcagtaggtgctcaataaatgttagccagcaaaaaaaaag

SEQ ID NO: 197 - DNA, 2648 bp, Homo sapiens
ggcacgagcttgtaggtactcattgaggtttattgtgtaagatgaatgaatgttgcaaattcctaaacatgtgattcagatgcccaatcttactctgttactttatgaaaattttttaaagctatatgatgttatatcaaaatatgttgttatactttaggataatcggtgtgttagccctgaatttcagcataagtcccatttttttccatgggagtctaggaaagctatatgtttattcagcagcaaaatacagtttggaacttaaataaactattgatcaatttctggtcttatgctagaaggaataaagcatcaagaaaaagaaaagatttgctgtcaagaccaggaaaatttgacaatagagtattagaatgcaggaaatgaggggaagtggaaaggcagcaagtaggagagaaaaagtgcagggacagtagaaagtgaatgtaggagctttctgacccatgcacttcaggaacgcaattcatccctaaaatgctgtttgctgtcttaggttgcaagtaaccaaattaaaaccagtttgaaagtagagtgagacagctgtcatcataagagtcatttgatctgtttaaaggtggctgcttgtatgcagggaccaacagtcatgtccagggcagcagctggtgcacacttcaagcacagaccataagagctaccccaggcagcacctgctaccaatagtgcaaacaactcagagagacctcgttggcataagggaatactctctcctttctgagtaaagagcaagtagaactaaaggtttcacattttaaacatactttacattcctcctcttctggggctcaagcctacttttgggccaaagcggatgttatatctgacatagagtcctcggagcagcagttgttcctgaaagttcctttttgcatctttgtgcctcatgcagtggcttacaggtcaaccagacttctcccctgacttttgatgtgtaagagcttgtgtttcaaatgggtttggttttcttaatgtcaccctaggttggtggaaaggagagtaaatggaaatggggggagcagggtcccctggggaggtttaaacagatggaagtcaattgtctcttgagaatagaggaggctattgagttttcattccacactctgctcctgttctgtcagcaaagaacaaggactactctccagcaattgctttccactggactcccccaccccggctcccacaaaaacctagggatcaacttagttcactccaaattagaaaatttaatagtcatttgtttcttcttgtccacagggagaaccattttctttccttctttcaaaattgcccaggtcttgtgaagggttattaacaccagaaagaaatacattttaataagcttaaatctcatttctacatgaaaccatcagattttagtactgcaatattttgatccctctgtcttttaggctctgacaccaaaattgccataatgaaggtgtttcacttcttctcatttatttttatgggatcttttattcccaaatgccttttcatcccagccaaagggagaaatgttgatagatctgccatcaagaaggttccaaagctggcctgtcaggttttctgtttccttgtttattatctttgaacttttgttttaaatgttttaaacacttatttaccatgtaactaaatgcctgatagcattgaaagtactttatgggttttaatttatttaatgctcatgaaaccctatgaggtaggtactgatattatttttattttactgatgaggaaagtgaagcaaagagaagtgaaatgaaaggtagtgagtgatgggaccagggtttggacatgggcagtctggctctaaaatgtatgcttttaactactatgtaatgctgcctcaccaacaacttgtctcacaaattgatattctggatcagaggatgtcgactggcctgcaaatgtattttgtatggctcatacacagttcagaagttttaaaaatttacatagaaatctgcatttcctgacttcttttgaaaatgggaataccaaacatcattaggcttgaattcccaatacggcaacaacagctgagcaacaagcagctgtttagactaggcaccttccgttcattccagcccacaatgcagatcatagtatcgacttaaatttcctgcctgccttagagaagcttctgagcttgtgacctctattctagctgctctatgaatggacgctgccccagtacagcgaggacctgctgcaaaatgcatttcttagtcttcaatacttattcctccttgtaactggatttctggtaagttatgtctcatggtggatctgccccaaagatggagactgaatggcagtgagtcactcgccctggcctccattgttctggagaaggttccagccacatggttgatgtcagctggttttccagagccagagctgggttgcaggacagacacacctgcatctaatagtgaaaggcaaagttgaaaggccaagaccagcctgaggtctgagggaccaagggcttcacagaggccagaagttcagaggtggacataaaaggtgttaggagaataaggaagtgaaaagaacatagtacagtgtatcagaggaggagctccaggctggcaaatatcactccc

SEQ ID NO: 198 - DNA, 3107 bp, Homo sapiens
ggcacgagagatagggttccacctgagtgctacagtggtgccacctcagatggtccctcctaaaggggcctacaacgtggctgtgatgtttgaccgctgccgggtcacttcctgcagctgtacctgtggggctggggccaaatggtgcacccacgtcgtggcactctgtctcttccgcatccacaacgcttctgcagtctgcctgcgagccccagtctcagagtccctgtcccggctacagagggaccagctgcaaaagtttgctcagtacctcatcagtgagctccctcagcaggtgggtgaggtcggcaccccctcctgcaattagctccgggccaggccgcataacagccttcctgttaggcccaggcctccatgggttcacctaggccgtgttctgcctgcctccgtctctttctccctcagatcctccccacagctcagcgtctcctggacgaactcctgtcttcccagtcaacagccatcaatacagtgtgtggagctccggaccccacagcagggccctcagcatcggaccagagtacttggtatctggatgaatcgacactcactgacaacatcaaaaagacactgcacaagttctgtggcccctcccctgtggtcttcagtgatgtgaactccatgtatctgtcttccacggagccgccagccgctgctgaatgggcatgtctgctgcgccctctgaggggccgtgagccagagggcgtctggaacctgctaagcattgtgcgggagatgttcaagcggagggacagcaatgctgcccccttgttggaaatcctcactgaccagtgcctcacctatgaacagataacaggttggtggtatagcgtacgtacctcagcctcacacagcagtgccagtgggcacacgggccgtagcaacgggcagtcagaggtggcagcccatgcctgtgccagcatgtgtgacgagatggtcacactgtggaggctggccgtgctggaccctgcactcagcccccagcggcgccgggaactgtgtacgcagctgcggcagtggcaactgaaggtgattgagaacgtcaagcggggccaacacaagaagacgctggagcggctcttccccggcttccggccagcggtggaggcctgctacttcaactgggaagaggcctacccacttcctggtgtcacctacagcggcactgacaggaagctggcactgtgctgggcccgggccctgccctctcggccaggtgcctcccgctctgggggcctggaggaatcccgggaccggccccgaccccttcctactgagccagctgtgcggcccaaggagcctgggaccaagcgaaagggcttgggtgagggggtcccctcatcacagcggggtccccgccgcctctcagctgaagggggagataaagctctacataagatgggtccaggtgggggcaaagccaaggcactgggtggggctggcagtgggagcaagggctcagcaggtggcggaagcaagcgacggctgagcagcgaagacagctccctggagccagacctggccgagatgagcctggatgacagcagcctggccctgggcgcagaggccagcaccttcgggggattccctgagagccctccaccctgtcctctccacggtggctcccgaggcccttccactttccttcctgagcccccagatacttatgaagaagatggtggtgtgtacttctcggaagggcctgagcctcccacagcctctgttggcccccctggcctactgcctggggatgtctgtacccaggacgacctcccttctacagatgagagtggcaatgggcttcccaaaaccaaagaggcagcccctgcagttggagaggaggatgatgactaccaggcgtactatctgaatgcccaggatggggctgggggcgaggaagagaaggccgagggcggggctggggaggagcacgacctgtttgctgggctgaagccactggaacaggagagtcgcatggaggtactgtttgcctgtgctgaggccctgcatgcgcatggctatagcagtgaggcctcccgtctcactgtggagcttgcccaggatctgctagccaacccacccgacctcaaggtagagccgccccctgccaagggcaagaagaacaaggtatccacgagccgtcagacctgggtggctaccaacaccctgagcaaggcggccttcctgttgacagtgctaagtgagcgtccagagcaccacaacctggccttccgagttggcatgtttgccttggagctacagaggcctccagcttctaccaaggccttggaggtgaagctggcataccaggagtctgaggtggctgccctgctcaagaagatccctctgggtccaagtgagatgagtaccatgcggtgccgggcagaggaacttcgggaggggacactctgtgactatcggcctgtgttgcctctcatgctggccagtttcatctttgacgttctctgtgctccaggtatgatgcctgaccctacagtaagtggggaactggggtaggggtagctttctctaagaaagaccaagagccccaagtttctgaatcacctttaggacccatcaggcagcttcatgggtaggtctgtgatgatgaggattttgggttcccctgtattttttcccatgcatgatacttctgtctgcctgacttaccccaacttttatacagtggtttctcccacaggttcccggcccccaagtcgcaactggaacagcgagacacctggggatgaggagcttggatttgaagcagcagttgctgccttgggcatgaagacaacagtgagcgaggcagaacatcccctcttatgtgaaggcacacgtcgggagaagggtgacctggcattagcactaatgatcacttacaaggacgaccaggccaagcttaagaagaaaattagccgggcatggtggcgcgcgcctgtagtcccagctactcgggaggctgaggtgggagaattgcttgagcccaggagtttgaggctacagtgagctataatcataccactgcactccagcctgggcaacagagcgagaccctgtctcttaaaaaaaaaaaaaaaagaaaa

SEQ ID NO: 199 - DNA, 1084 bp, Homo sapiens
ggcacgagccaccatgcccggcctagattaaaaatttgaagacatattctctactatgagccaatgaaattactcattttgtttctatcccatttgctgtcccttgcttttggaattttgtgtcttagtgtgactgtgattctttctctccttttgtctttcagcaaacggggattcagcgtccgatcctttggaacagggactcacgtgaagcttccaggaccagctcccgacaagcccaatgtttatgatttcaaaaccacatatgaccagatgtacaatgatcttcttaggaaagacaaagaactctatacacagaatgggattttacatatgctggacagaaataagagaatcaagccccggccagaaagattccagaactgcaaagacctgtttgatctgatcctcacttgcgaagagagagtgtatgaccaggtggtggaagatctgaattccagagaacaggagacctgccagcccgtgcacgtggtcaatgtggacatccaggacaaccacgaggaggccaccctgggggcgtttctcatctgtgagctctgccagtgtatccagcacacggaagacatggagaacgagatcgacgagctgctgcaggagttcgaggagaagagtggccgcacctttctgcacaccgtctgcttctactgagcccagcgcccgcatggagccgcctctggagcttcctgttgttcatactttttccttcctgacatttgtttttacttacaggtgttctgctggtgacggtagcattacccaaataaactgtgcatatgaaatgggagaggagatgccaaaacgccagatgaaagcaatcaagtttcttcttttccacttttacttatgagcgggatattgattacaaagtttttcttctttaaccaaaaaggaaagacaacggtttgtgtgcacttcccgacatacctgtgtcttcgtgtgcctgccttccctccctcctccccaccgggccggactgtacagagccctgctgcggcgtgttaggaatgacctggaattgtcaataaacagatgctgctgtcaaaaaaaaaaaaaaaaaaaaaaa

SEQ ID NO: 200 - DNA, 2072 bp, Homo sapiens
cccacgcgtccggcgttttacgcaggctgtggcagcgacgcggtccccagcctgggtaaagatggccccatggcccccgaagggcctagtcccagctgtgctctggggcctcagcctcttcctcaacctcccaggacctatctggctccagccctctccacctccccagtcttctcccccgcctcagccccatccgtgtcatacctgccggggactggttgacagctttaacaagggcctggagagaaccatccgggacaactttggaggtggaaacactgcctgggaggaagagaatttgtccaaatacaaagacagtgagacccgcctggtagaggtgctggagggtgtgtgcagcaagtcagacttcgagtgccaccgcctgctggagctgagtgaggagctggtggagagctggtggtttcacaagcagcaggaggccccggacctcttccagtggctgtgctcagattccctgaagctctgctgccccgcaggcaccttcgggccctcctgccttccctgtcctgggggaacagagaggccctgcggtggctacgggcagtgtgaaggagaagggacacgagggggcagcgggcactgtgactgccaagccggctacgggggtgaggcctgtggccagtgtggccttggctactttgaggcagaacgcaacgccagccatctggtatgttcggcttgttttggcccctgtgcccgatgctcaggacctgaggaatcaaactgtttgcaatgcaagaagggctgggccctgcatcacctcaagtgtgtagacattgatgagtgtggcacagagggagccaactgtggagctgaccaattctgcgtgaacactgagggctcctatgagtgccgagactgtgccaaggcctgcctaggctgcatgggggcagggccaggtcgctgtaagaagtgtagccctggctatcagcaggtgggctccaagtgtctcgatgtggatgagtgtgagacagaggtgtgtccgggagagaacaagcagtgtgaaaacaccgagggcggttatcgctgcatctgtgccgagggctacaagcagatggaaggcatctgtgtgaaggagcagatcccagagtcagcaggcttcttctcagagatgacagaagacgagttggtggtgctgcagcagatgttctttggcatcatcatctgtgcactggccacgctggctgctaagggcgacttggtgttcaccgccatcttcattggggctgtggcggccatgactggctactggttgtcagagcgcagtgaccgtgtgctggagggcttcatcaagggcagataatcgcggccaccacctgtaggacctcctcccacccacgctgcccccagagcttgggctgccctcctgctggacactcaggacagcttggtttatttttgagagtggggtaagcacccctacctgccttacagagcagcccaggtacccaggcccgggcagacaaggcccctggggtaaaaagtagccctgaaggtggataccatgagctcttcacctggcggggactggcaggcttcacaatgtgtgaatttcaaaagtttttccttaatggtggctgctagagctttggcccctgcttaggattaggtggtcctcacaggggtggggccatcacagctccctcctgccagctgcatgctgccagttcctgttctgtgttcaccacatccccacaccccattgccacttatttattcatctcaggaaataaagaaaggtcttggaaagttaaaaggcatcagtcttactacctgtcccaccacccccaccttagggaaatgtcctagaatcctgggaaattgagggcttctttgatggtgagtggagaaaagatagaggagaaggttgcccctgaagtgctgttaggagaaggaggatagaggaatcagccttaggagggttccatgccagctgtcatttggcaaaggaccctggacagatgacttttgcctctgaacttcactcttctctttcctcaaatgggcttcataatgctttccactcaggcttaacatgagaattaaatgag

SEQ ID NO: 201 - DNA, 1251 bp, Homo sapiens
gacccacgcgtccgagcaaacccaggaaggtgtggcgtccccgcttcgcgccaagatggtgctggtgctgcgccatcctttgtgtgcccgggaaagggcgttccgggagccgggtcgggggctcctgactcgcactgggcagcatgacggtgcgccggctgtcactgctgtgccgggacctctgggcgctgtggctgctgctgaaggccggcgcagtacgtggggcgcgggcaggtcctcgcctccccggaaggtgttgtggggcgacatgcggggacgccgggcgggggtggacgttctgggcccagccctgtcctcagaggctgctggggcagaagcccggggctgggggatgccggggatgggtgttggggtgggtgcctccgagaccagaggagccctgttccttggcagggaaggtgtgcacgggccttgcccgatggatggtttagggccatggccctggggtccctggtgagcagtggggccgcctctgcccttggcctgtgagggactgtctgtgctggtcccagaaggctgggatcacctttccactggctcctttgttcgaggtttttcatagacaggctatgtggacaaatgagggcagcgcccacgtctggctggtggaggggctgcggctcctccttggaggggacgcctggccactgctgtccccacaatggggccacccgtggtgcaaggcgtgacaagctgccctctctaggtaagcaggacttgggaggcccctggccaagcctgtggacccggctgggcggcctctgtggtctcaggtttgggtgtgtttggtctggtcagggctcaggggctgctggtccacactggccccatcctgacaattggagctttggggcaaggtccctggagaaggggtcacgtcgggaggaaacagcctgggttttgttgatgcttttctaagaatggagtactcgttttcaagagatttgtcctaattatattttccagcgggtacttatgccaagtattgatgaataattcataaaataagcatctttgtgaattttagtgaatcagaccttaactatcaacggcaatgaatgaacatctaaagtttccaattttaaagtaaagaactggctgggtacagcagttcacgcctgtaatcccagcactttgggaggccaaggctagaggatcgcttgagcccaggagtttgagatcagcctgggcaacataccaagacctcatctgttaaaaaaaaaaaaaaaa

SEQ ID NO: 202 - DNA, 1539 bp, Homo sapiens
cgatggccccgcggccgctctagaaagtcccgttttttttttttttttttttttttttttttttagagtacgttctgcattttatttytgcaggcaacactttgctcaccagcaagaacacagcccraggaagggacccaataacctttcaaaacscaaactgctkcctgcggtgagggcccagggtcctccacggagaggacaggcatcttcctttcccaccaggaaggagtcagcccggagcctctgctatgtgcaaggcggtgtgcaagcaccggctgcrgctytttgctgtctcttctttctctttggggctgggctgggtgtgcgttctggtgctgatgctttggcctgtgaggctgagcttggcacctcgacccgttcaattacagcaacgaagaagccactgctgagtgtggtctcaggggaggcccggaggcagtgctcggcacccgggaacgtgctcaggcctcggtggggccaggcaggcagggcgggagctagcctgaaggcgcccgggttctgctgcagcgcatctcgcaccacgtcttcattctcctcctggcagagggagcacgtggagtagacgagccgctgcagggaagggaaagtgagcgcgtggcacagggctcgctgctggaaccctgccagggcatgcagacgcaccgggctaggtgtgcctgccccgggctcctccagctgtctgctcggcatacccgagccactgcaggaaggatccagcaggayrtagtggacctcaygrtagcgyggatcyragggggagaccgccaggaagtcctcctcagccagytcacagcargagacgccagcccrggccagcagcgtggccatggatgccagccgcttggcatccaggtcaaaggcaaagatcttcccttggttcttcagaagagcagccaagtgactggtcttattgcctggggcggcacaggcatcgatgacatgggagcctggcggggggtccagcagcatggctgggagacagctggccctgtcctgcagaatgaggtgtccggcccggtacagtgggtgttcatgcagatctgtctgggcgggaaacaccagcagctccggcatcaaggggtccaggagaaaatgcttccccttgagggctcgtaagtcatcgaggctggaagcccgaccctgataggagaaaccttgtctcttgaaataatcaactacatcatcggagcaggtcttgagagtgttcacacgcacaaatcgaggcagctgggaggctggaccaggcctggatcccacttccaacaggtcctcattccggctcacaccccgatgaaccttgagccgagccaactcagccttgagcctcgcctggtgccggcccaacagagccttccatcggcccccaccccctcgaaagccctttcccaacaacaactcatacactagcaccttggccaggtgcggccgctctagaggatccctcgaggggcccaagcttacgcgtgcatgcgacgtcatagctctctccctagagtgagtcgaatgaggttcata

SEQ ID NO: 203 - DNA, 2077 bp, Homo sapiens
cccacgcgtccgcggacgcgtgggcggacgcgtgggtaggccgcgagcttagtcctgggagccgcctccgtcgccgccgtcagagccgccctatcagattatcttaacaagaaaaccaactggaaaaaaaaatgaaattccttatcttcgcatttttcggtggtgttcaccttttatccctgtgctctgggaaagctatatgcaagaatggcatctctaagaggacttttgaagaaataaaagaagaaatagccagctgtggagatgttgctaaagcaatcatcaacctagctgtttatggtaaagcccagaacagatcctatgagcgattggcacttctggttgatactgttggacccagactgagtggctccaagaacctagaaaaagccatccaaattatgtaccaaaacctgcagcaagatgggctggagaaagttcacctggagccagtgagaataccccactgggagaggggagaagaatcagctgtgatgctggagccaagaattcataagatagccatcctgggtcttggcagcagcattgggactcctccagaaggcattacagcagaagttctggtggtgacctctttcgatgaactgcagagaagggcctcagaagcaagagggaagattgttgtttataaccaaccttacatcaactactcaaggacggtgcaataccgaacgcagggggcggtggaagctgccaaggttggggctttggcatctctcattcgatccgtggcctccttctccatctacagtcctcacacaggtattcaggaataccaggatggcgtgcccaagattccaacagcctgtattacggtggaagatgcagaaatgatgtcaagaatggcttctcatgggatcaaaattgtcattcagctaaagatgggggcaaagacctacccagatactgattccttcaacactgtagcagagatcactgggagcaaatatccagaacaggttgtactggtcagtggacatctggacagctgggatgttgggcagggtgccatggatgatggcggtggagcctttatatcatgggaagcactctcacttattaaagatcttgggctgcgtccaaagaggactctgcggctggtgctctggactgcagaagaacaaggtggagttggtgccttccagtattatcagttacacaaggtaaatatttccaactacagtctggtgatggagtctgacgcaggaaccttcttacccactgggctgcaattcactggcagtgaaaaggccagggccatcatggaggaggttatgagcctgctgcagcccctcaatatcactcaggtcctgagccatggagaagggacagacatcaacttttggatccaagctggagtgcctggagccagtctacttgatgacttatacaagtatttcttcttccatcactcccacggagacaccatgactgtcatggatccaaagcagatgaatgttgctgctgctgtttgggctgttgtttcttatgttgttgcagacatggaagaaatgctgcctaggtcctagaaacagtaagaaagaaacgttttcatgcttctggccaggaatcctgggtctgcaactttggaaaactcctcttcacataacaatttcatccaattcatcttcaaagcacaactctatttcatgctttctgttattatctttcttgatactttccaaattctctgattctagaaaaaggaatcattctcccctccctcccaccacatagaatcaacatatggtagggattacagtgggggcatttctttatatcacctcttaaaaacattgtttccactttaaaagtaaacacttaataaatttttggaagatctctgatttttatgtgttcatttatgaacattaaatatgaaaatattatggtttatattatttattgaaggagtagaggaattactcaactttagtatgctcttaattgaatatatggaggcatttgactttctaatttgtatatttttatattatgtgaattttaaaaatgagctttggaattttttaatttatagaaaaaaaaaaaaaaaaaa

SEQ ID NO: 204 - DNA, 2108 bp, Homo sapiens
ggcacgagggagacctaaacacagtcaccatgaagctgggctgtgtcctcatggcctgggccctctacctttcccttggtgtgctctgggtggcccagatgctactggctgccagttttgagacgctgcagtgtgagggacctgtctgcactgaggagagcagctgccacacggaggatgacttgactgatgcaagggaagctggcttccaggtcaaggcctacactttcagtgaacccttccacctgattgtttcctatgactggctgatcctccaaggtccagccaagccagtttttgaaggggacctgctggttctgcgctgccaggcctggcaagactggccactgactcaggtgaccttctaccgagatggctcagctctgggtccccccgggcctaacagggaattctccatcaccgtggtacaaaaggcagacagcgggcactaccactgcagtggcatcttccagagccctggtcctgggatcccagaaacagcatctgttgtggctatcacagtccaagaactgtttccagcgccaattctcagagctgtaccctcagctgaaccccaagcaggaggccccatgaccctgagttgtcagacaaagttgcccctgcagaggtcagctgcccgcctcctcttctccttctacaaggatggaaggatagtgcaaagcagggggctctcctcagaattccagatccccacagcttcagaagatcactccgggtcatactggtgtgaggcagccactgaggacaaccaagtttggaaacagagcccccagctagagatcagagtgcagggtgcttccagctctgctgcacctcccacattgaatccagctcctcagaaatcagctgctccaggaactgctcctgaggaggcccctgggcctctgcctccgccaccaaccccatcttctgaggatccaggcttttcttctcctctggggatgccagatcctcatctgtatcaccagatgggccttcttctcaaacacatgcaggatgtgagagtcctcctcggtcacctgctcatggagttgagggaattatctggccaccggaagcctgggaccacaaaggctactgctgaatagaagtaaacagttcatccatgatctcacttaaccaccccaataaatctgattctttattttctcttcctgtcctgcacatatgcataagtacttttacaagttgtcccagtgttttgttagaataatgtagttaggtgagtgtaaataaatttatataaagtgagaattagagtttagctataattgtgtattctctcttaacacaacagaattctgctgtctagatcaggaatttctatctgttatatcgaccagaatgttgtgatttaaagagaactaatggaagtggattgaatacagcagtctcaactgggggcaattttgccccccagaggacattgggcaatgtttggagacattttggtcattatacttggggggttgggggatggtgggatgtgtgtgctactggcatccagtaaatagaagccaggggtgccgctaaacatcctataatgcacagggcagtaccccacaacgaaaaataatctggcccaaaatgtcagttgtactgagtttgagaaaccccagcctaatgaaaccctaggtgttgggctctggaatgggactttgtcccttctaattattatctctttccagcctcattcagctattcttactgacataccagtctttagctggtgctatggtctgttctttagttctagtttgtatcccctcaaaagccattatgttgaaatcctaatccccaaggtgatggcattaagaagtgggcctttgggaagtgattagatcaggagtgcagagccctcatgattaggattagtgcccttatttaaaaaggccccagagagctaactcacccttccaccatatgaggacgtggcaagaagatgacatgtatgagaaccaaaaaacagctgtcgccaaacaccgactctgtcgttgccttgatcttgaacttccagcctccagaactatgagaaataaaattctgttgtttgtaagctaaaaaaaaaaaaaaaaaaaaaaaaaaaa

SEQ ID NO: 205 - DNA, 1146 bp, Homo sapiens
  misc_feature (5)..(5): n equals a,t,g, or c
  misc_feature (857)..(857): n equals a,t,g, or c
tccancattatgggatacattgatgatccagacaaatatcatcagggttttgaattgttgctgtcagccttgggtgatccctcagaaagagtagttagtgctacacatcaagtatttttaccagcttacgctgcgtggactacagaacttggaaatttacagtctcatcttatacttacactactgaacaagattgaaaaacttctcagggaaggagaacatggactggatgaacacaaactccacatgtatctttctgccttgcagtccttgatcccatctctctttgcattagtgctacagaatgcacctttctccagcaaagccaagcttcatggtgaagtgccacagatagaagtgactaggtttcctcggcctatgtcgcctcttcaagatgtgtccactattatcggaagtcgtgagcaattggcagtgctgctgcaactttatgactaccagctagaacaagagggtacaacaggctgggagagtttactgtgggttgtcaatcaattgttgccacaacttatagaaatagttggcaaaattaatgttacttcaactgcctgtgtccatgaattctccagatttttctggcgcctttgccggacatttggcaaaatttttacaaacactaaggtaaaacctcagttccaggagattttaagactatctgaagaaaacattgattcctcagcaggaaatggggtcctcactaaagctacagtccccatttatgcaacaggagtccttacgtgttatattcaggaagaagaccgaaaactgttagttggattcttagaagatgtaatgacgctgctttcattatctcatgctcctcttgatagcctgaaggnttcttttgtggaattgggtgcaaaccaggcctaccatgagttactattaactgttttgkggtatggkgtkgkccatacttcagcactcgtgaggtgtactgctgctagaatgtttgagctgttggtgaagggggtgaatgaaactctggtagctcagagggttgttcctgctctcattactctctccagtgaccctgaaatctctgtcaggattgccacaattccagcctttggsactattatggaaacagtaattcaaagagagttgctggaaagagtgaaaatgcag

SEQ ID NO: 206 - DNA, 1998 bp, Homo sapiens
ggcacgagaacaatttcccttgtacataatatacttatgtacttataccattgactctgtaagataaaagtcttagaaatggggttgccaagtcaaagggtctatgcatttaacacagggaatgagtactgtcacgtggcttctgaaactgtttacccagtttatgttcccaccaacagtgtctaattcccatacctgtgctaggtattatgtctttaatttttgtctgattatttcatttaattttaatttccattatcactggtgaggttgggcttctgttcagtttttttgtcatttatgtttcttttgtgaattgccttttcctatgctttgtgcatttttctcttggggtttgtctttttaaaattgatatacaggtgttctctataatatagatattctgccactatatgcaaatgatcttccaatttatttatttatttgaaacagagtttcactcttgtcaccaggttggagtgcagaggtgcgatcttggctcactgcaacctccacctcccaagttcaagcgattttcctgcctcagcctccctagtaactgggattacaggtgccctgccaccatgcccggctaatttttgtatttttggtagagacggggttttgccatgttggccaggctggcctcgaactcctgacttcaggtgatctgcccacctcagcctcccaaagtgctgggattacaggcctgagctaccgcaccggccccaatttatttcttttaacttagtttatggtgcctttagctgtacaaaagttactaatttttagtcaaatatccagcttttcctttagggcttcttatatgtcctgatccaaggattattttttaaaaattcttccgtattttctcctataatattcataggttactttacaattagatttttaatacatctcctaactttttcatatagtatgaggtatccatttttaaaaaatggatatccagttgtgcccatatgtcttttccactcatctgaaatgccaccattatcatattttcaattttcatgtgcacgtgggtctgttttcaaacttggagattctcttccactgatatatgtctattcttgtgccagtggtttaactgctattgctttatagtatattttgatatcttcttttcaaaaggatactcttgtgtattctttttttcatcttgtgtattctcatccattttccagaaaaccacagaatcaactttaagtttcatttcattaagtcagattagtgagagctgattttctgtgtatcatgttcattcagaaacatagtctatctctccatttaggggcacttgttttatattttctttctaacacgtattttgttgggtttattgtaccttttttttttttaacttcagattcaggggggtgcacgtgcaggtttgttacctgagtatacgatatgatactgaggttggagtatgaatgatgccattacccaggtactgggcataatacccaatagttagtttttcaacccttgcccttctccctctctcctccctctagtagtccccagtttctaatactgccatctccatgttcatgagaacccagtgtttagctcccacttataagtgagagcatgttgcatttggttttctgttcctgccatatcctttgtagggacatggatgaaattggaaaacatcattctcagtaaactatcgcaagaacaaaaaaccaaacaccacatattctcactcataggtgggaattgacaatgggaacacatggacacaggaaggggaacatcacactctggggactgttgtggggttggcggaggggggagggatagcattgggagatatacctaatgctagatgacgagttagtgggtgcagtgcagcagcatggcacatgtatacatatgtaactaacctgcacaatgtgcacatgtaccctaaaacttaaagtataatataaaaaaaaaaaagaacaaaacttaaaaaaaaaaaaaaaa

SEQ ID NO: 207 - DNA, 970 bp, Homo sapiens
ctcgtgccgaattcggcacgaggtgcccaggctctcagggcagagggtccagtgtgatcactttgcatggcctctctcccctcctgagcttgtgccagggccccagggctgacctggagaggaaaawggcagagggtgaagatggggtgtctggtttggggaccatcctggccccccttgtcactgttggcatctcttctgcacagtggcattgctgggaggtgcttactgtgcctattcaaggggctggcagccgcagcctcactgcagatcagggacttggcttcccggttgaccacaggtccaagaacctgcagggtccagcctcccccccatccccagtcttccccaccctggcccggccctccaggtgcagaaacatgcaggcccctctccaggactgtgggaggagtgtgtccctcagactggcctgtgtcctggctcctcttaccacctcttccagaggttgtcacctgcagctgccccaggataaaggcaaggccagagaggactcctgaactcctgtgtgcctggggtggcaggggcaaacatagccaactggtggcctgagcggggccatggtgargacacccttggtggcttgtcccacatcaagctgggargtgacactgaggatgcattagtctgcagcgtatgataaaaacggcatttcaggccaggcgtggtggctcatgcctgtcaccccagcaccttgggaggccgaggtgggcagatcacatgaggtcaggactttgagaccagcctggccaacatggtgaaaactcatctgtactaaaaaaacaaaaattatgtgggttggtggtgtgtgcctgtaatcccagctacttgggaggctgaggcaggagaatcacttgaacctgggaggcggaggctacaacgagccgagattgcaccactgcactccagcctgatccgtctcaaaaaaaaaaaaaaaaaaaaaaaaactcga

SEQ ID NO: 208 - DNA, 1782 bp, Homo sapiens
tgccgagcctctttggtagcaggaggctggaagaaaggacagaagtagctctggctgtgatggggatcttactgggcctgctactcctggggcacctaacagtggacacttatggccgtcccatcctggaagtgccagagagtgtaacaggaccttggaaaggggatgtgaatcttccctgcacctatgaccccctgcaaggctacacccaagtcttggtgaagtggctggtacaacgtggctcagaccctgtcaccatctttctacgtgactcttctggagaccatatccagcaggcaaagtaccagggccgcctgcatgtgagccacaaggttccaggagatgtatccctccaattgagcaccctggagatggatgaccggagccactacacgtgtgaagtcacctggcagactcctgatggcaaccaagtcgtgagagataagattactgagctccgtgtccagaaactctctgtctccaagcccacagtgacaactggcagcggttatggcttcacggtgccccagggaatgaggattagccttcaatgccaggctcggggttctcctcccatcagttatatttggtataagcaacagactaataaccaggaacccatcaaagtagcaaccctaagtaccttactcttcaagcctgcggtgatagccgactcaggctcctatttctgcactgccaagggccaggttggctctgagcagcacagcgacattgtgaagtttgtggtcaaagactcctcaaagctactcaagaccaagactgaggcacctacaaccatgacataccccttgaaagcaacatctacagtgaagcagtcctgggactggaccactgacatggatggctaccttggagagaccagtgctgggccaggaaagagcctgcctgtctttgccatcatcctcatcatctccttgtgctgtatggtggtttttaccatggcctatatcatgctctgtcggaagacatcccaacaagagcatgtctacgaagcagccagggcacatgccagagaggccaacgactctggagaaaccatgagggtggccatcttcgcaagtggctgctccagtgatgagccaacttcccagaatctgggcaacaactactctgatgagccctgcataggacaggagtaccagatcatcgcccagatcaatggcaactacgcccgcctgctggacacagttcctctggattatgagtttctggccactgagggcaaaagtgtctgttaaaaatgccccattaggccaggatctgctgacataattgcctagtcagtccttgccttctgcatggccttcttccctgctacctctcttcctggatagcccaaagtgtccgcctaccaacactggagccgctgggagtcactggctttgccctggaatttgccagatgcatctcaagtaagccagctgctggatttggctctgggcccttctagtatctctgccgggggcttctggtactcctctctaaataccagagggaagatgcccatagcactaggacttggtcatcatgcctacagacactattcaactttggcatcttgccaccagaagacccgagggaggctcagctctgccagctcagaggaccagctatatccaggatcatttctctttcttcagggccagacagcttttaattgaaattgttatttcacaggccagggttcagttctgctcctccactataagtctaatgttctgactctctcctggtgctcaataaatatctaatcataacagc

SEQ ID NO: 209 - DNA, 1205 bp, Homo sapiens
ggcagagcttttgtgcagcaccctttaaagggtgactcgtcccacttgtgttctctctcctggtgcagagttgcaagcaagtttatcggagtatcgccatgaagttcgtcccctgcctcctgctggtgaccttgtcctgcctggggactttgggtcaggccccgaggcaaaagcaaggaagcactggggaggaattccatttccagactggagggagagattcctgcactatgcgtcccagcagcttggggcaaggtgctggagaagtctggcttcgcgtcgactgccgcaacacagaccagacctactggtgtgagtacagggggcagcccagcatgtgccaggctttcgctgctgaccccaaatcttactggaatcaagccctgcaggagctgaggcgccttcaccatgcgtgccagggggccccggtgcttaggccatccgtgtgcagggaggctggaccccaggcccatatgcagcaggtgacttccagcctcaagggcagcccagagcccaaccagcagcctgaggctgggacgccatctctgaggcccaaggccacagtgaaactcacagaagcaacacagctgggaaaggactcgatggaagagctgggaaaagccaaacccaccacccgacccacagccaaacctacccagcctggacccaggcccggagggaatgaggaagcaaagaagaaggcctgggaacattgttggaaacccttccaggccctgtgcgcctttctcatcagcttcttccgagggtgacaggtgaaagacccctacagatctgacctctccctgacagacaaccatctctttttatattatgccgctttcaatccaacgttctcacactggaagaagagagtttctaatcagatgcaacggcccaaattcttgatctgcagcttctctgaagtttggaaaagaaaccttcctttctggagtttgcagagttcagcaatatgatagggaacaggtgctgatgggcccaagagtgacaagcatacacaactacttattatctgtagaagttttgctttgttgatctgagccttctatgaaagtttaaatatgtaacgcattcatgaatttccagtgttcagtaaatagcagctatgtgtgtgcaaaataaaagaatgatttcagaaaaaaaaaaaaaaaaaaactcggggggggccggtacccattygccccaag

SEQ ID NO: 210 - DNA, 1443 bp, Homo sapiens
ggaaccattggcctatattgggttggatctattattatgagtgttgttgtttttgtgccaggaaacattgtagggaagtatggaacacgaatttgccctgcttttttcttaagcataccatatacttgtcttcctgtctgggctggtttcagaatctataatcagccatcagaaaattataattacccctcaaaggttattcaagaagcccaagcgaaagacctgctgagaagaccatttgatttaatgttggttgtgtgtctcctcctggcaactggattttgcctgttcagaggtttgattgctttggattgcccatctgagctctgccgattatatacgcaatttcaagagccctatctaaaggatcctgctgcttatcctaaaattcagatgctggcatatatgttctattctgttccttactttgtgactgcactgtatggcttagtggttcctggatgttcctggatgcctgacatcacattgatacatgctggaggtctggctcaggctcagttttctcacattggtgcatctcttcatgctagaactgcttatgtctacagagtccctgaagaagcaaaaatcctttttttagcattaaacatagcatatggagttcttcctcagctcttggcctatcgttgtatctacaaaccagagttcttcataaaaacaaaggcagaagaaaaagtggaataaaaatattacttcatgttcctcctttctaaattactaacttttgttatactggtactgatattttgtcccatttcactctcttctcatacgtgagtacttaagaatatgtacattcttgctctgcactgtatgtgtgagctatatggtattgtgtaaattttttttgaaggaaaatggaaattcttgagaaacagtttgtttaaagaaatatattcaaaatcatttgtgaataaacttgatcatccatctcaatattgtttgacatataaaataattataagtgtaaaaaattacaatttagtgccaacagtagtgagcatgaaatgaaactattcaaaagagaatatggcctgtgcatattaaaaaattcaaaacagtgaatgcagactggaggagtaacttttgcaaataagatgaatatgcttcattattaaactcaatataaaaggcaaatcatcagaatatttttaaatgttgtttgaaaaatgttttcccaaggaaagtttattatttgctgctgtttcaagaaaattacttttactaaatttttttgtgtgaatttaaacagctaaatagggatcagtaactttatctctatccttaatgaacatttgttttattggtggctggaaatatttctattgtatttctgtgtatatttttaataaaattatttttggcctcttaaaaaaaaaaaaaaaaaaaaaaaaaaaaaaaaaaaaaaaaaaaaaactcgag

SEQ ID NO: 211 - DNA, 561 bp, Homo sapiens
agggatcccccgggctgcaggaattcggcacgagtctactctcaaaaaattcagaaacatatatttgtgtgcatttgcatgtgcaacagtacacacaaacatacataaagagagcaattgataaggcaaataaggtaacatttaacaataatctgatacacataaatagagaaagagcaattgataaagtaaatgaggtaaaatttaacaataatctgagcaaaaggtatatgtgttttctttgagacagtctgattcttgcaacttattctgtaagttggaacttatttccaaacatgattgaaaaaaaaccccgcacttggcaacttcttctctttttcagcctagaaatgtctgtgttaagtggttttttatttattgttgttgtttgttgttattgttgttttgttgccaggctccaactcacaaaatacgagtttaaaaactgcgttgttatttttagagatttgtgataatacaacttgttataaaatttattcctcaataaatataatttctctactaaaaaaaaaaaaaaaaaaaaaaaaaaaaaaaactcga

SEQ ID NO: 212 - DNA, 809 bp, Homo sapiens
ggcacgaggagaatcatgggcctctggctgggcatgctggcctgtgtcttcctggcaactgctgcctttgttgcttatactgcccggctggactggaagcttgctgcagaggaggctaagaaacattcaggccggcagcagcagcagagagcagagagcactgcaaccagacctgggcctgagaaagcagtcctatcttcagtggctacaggcagttcccctggcattaccttgacaacgtattcaaggtctgagtgccacgtggacttcttcaggactccagaggaggcccacgccctttcagctcctaccagcagactatcagtgaaacagctggtcatccgccgtggggctgctctgggggcggcgtcagccacactgatggtggggctcacggtcaggatcctagccaccaggcactagcaaagaagcttggaaatagaaagccaggagtggctgtccccagtatgcaaacacaccacggtctgccctgcaaaaacaccaatggggtctagtgcaggtggacactttgaaccactcctcaaaaaaagaactttggctgattccttgtggtgacactcagaggggtctgaacagacttgacaattctgttctggtcaagctggagttttcttctgtgacttggactgctctacagaagacatcagccaactgcacgagtcagagtccagggattgtcactattattaataatgtaaatggcttcaaatgggacactgcagataaaatcacaaaaaccactgttatattaaagattacacatttcctggaaaaaaaaaaaaaaaaaa

SEQ ID NO: 213 - DNA, 1986 bp, Homo sapiens
ggcacgagggaaaactgttttatttgcatttgaagaagctattggatacatgtgctgcccttttgttctggacaaagatggagtcagtgccgctgtcataagtgcagagttggctagcttcctagcaaccaagaatttgtctttgtctcagcaactaaaggccatttatgtggagtatggctaccatattactaaagcttcctattttatctgccatgatcaagaaaccattaagaaattatttgaaaacctcagaaactacgatggaaaaaataattatccaaaagcttgtggcaaatttgaaatttctgccattagggaccttacaactggctatgatgatagccaacctgataaaaaagctgttcttcccactagtaaaagcagccaaatgatcaccttcacctttgctaatggaggcgtggccaccatgcgcaccagtgggacagagcccaaaatcaagtactatgcagagctgtgtgccccacctgggaacagtgatcctgagcagctgaagaaggaactgaatgaactggtcagtgctattgaagaacattttttccagccacagaagtacaatctgcagccaaaagcagactaaaatagtccagccttgggtatacttgcatttacctacaattaagctgggtttaacttgttaagcaatatttttaagggccaaatgattcaaaacatcacaggtatttatgtgttttacaaagacctacattcctcattgtttcatgtttgacctttaaggtgaaaaaagaaaatggccaaacccaacaaactaacattcctactaaaaagttgagcttggacatattttgaatttttgtaagtgaagatttttaaactgactaacttaaaaaaatagattgtaattgatgtgccttaatttgcataaatcataaatgtatgtcctctctgtaattgttttaatgtgtgcttgaaatatccagaaaacctatggagttagtaaattctgggctgtcatatgtaggatagccactttttaggtatatgtacatttatatttctatcaattccttagaaagtaaaataaatgaatagatcaaatgttgtgttcatgtttggggaaaatataatttgcagaaacctatgaagtagagcaaagatgctttaaaaagataagtttttttgaactaaattttttttagttctaataatgcacataggatattagtacatcgtacacgtgctaggaaaaaacagcttcagtgtctttgtttaatgtgttgaaactcatctttttaaatcttgaaaaaccaattgtttacttgaaacttgaaagtagcatatttttctgttttttggttgtttgttcatttgtattagcacaatttaatgtaattcctggtttggaggcagcaagacctatgagcaagaactatttacttgaccctcgtttttttctcttgttcttgtgtggtctgaaatctaaaactagactttattatgatagatttcctataagccaatttctaataacaaatagatttattatttaatctgtaccttctatcttctcataattcgtggtcttacagccttccaaaataactccagttgggcacccatgagctaggatcaaactttctttatatactttatatattttacattatttctgatttttaaagcaaatgattgccattatgattacactcaacctaaatagttatgaacagtttcagaacaatgaaaaattacaatactatgtgatagtattgtaactatttttctattttagtcatatgtcgcttatatcctaccagaactcttaaatctataatattcgatatattctacaaactgctttattgtagaagccatatttatgtttattttataatgttttctagtgtcaaactgtactgtggagaaaagaaatgttagatctgtgttctgtctgcattttttttgagtacatacccttcaccctcaaaaaaaaaaaaaaaaaaa

SEQ ID NO: 214 - DNA, 1303 bp, Homo sapiens
aggttaaatgcgtacttttctaacctttgttattttgaaagttattctgatattcctatccagttgtgcctcatttactagaaatttgctcacatggccaaatgatgtatccacagaacaatttgaaactagaccttttggaagcgaactcctacaaactgtcatcaatgttagcagaacttgagcaaagacctcaacccagccatccttgtagtaattccatcttcaggtggagggaaaaggtaacatttaaggagactggttgtaatttcttgattgggcctgctgggtggagtggcttaaagtagcatcagggcaaaaaaggtgttaggaattctatgtgatattaatattcatgcagttagttaagaagataaatgttttwatttttcttttgagcacaataacaagagctagacaaaaccgaatacattctgtgtacaccaaacttctatgagaagctaaaaaacacttttgatttcttctttctcatcatacctgaatttcatcctttggatgtgcttttacagtaaaatttctattaaattgaaattttaatattcgttcagacctaaattataagattttgtggtatgtattagtctcatctgtttaagatggtgcctaatgcagataatgcatcagtacagctctgaaatgcttgtagctatttttattactgatcagaagggggaactgtaatcatcttgtgaagggacagttttctaaggctcaagagctcgaaaacaatctcaatcatttacagggttgtgatcatttcacttgcattaagccaactaaagttgtatttgtaaaagtaatgctatgaatattactatttgacctagacacataggttagaattggaaacacaggctataaagtatagtaattgtgtaattgtgaaaatattaaggcttcaactcaaaactgaaacacagtagggcttagaaatctttgaattatttatacccctcagtttaaaaacttccagtccaggcgcagtggctcatgcctgtaatcccagaactttgggaggccaaggcaggcggatcacctgaggtcaggagttcgagagcagcctggctgacacggtgaaaccccgtctctactaagaatacaaaaattagccaggcatggtggtgggcacctgtaatcccagctacgggggaggctgaggcaggagaatcacttgaacccgggaggtggaggttgtagtgggccaagatcatgccactgcactccagcctgggtgaacagggcaagactctgtctaaaaaaaaaaaaaaaaaaaactcgtagg

SEQ ID NO: 215 - DNA, 587 bp, Homo sapiens
ggcacgaggcggagcgaagctggataacaggggaccgatgatgtggcgaccatcagttctgctgcttctgttgctactgaggcacggggcccaggggaagccatccccagacgcaggccctcatggccaggggagggtgcaccaggcggcccccctgagcgacgctccccatgatgacgcccacgggaacttccagtacgaccatgaggctttcctgggacgggaagtggccaaggaattcgaccaactcaccccagaggaaagccaggcccgtctggggcggatcgtggaccgcatggaccgcgcgggggacggcgacggctgggtgtcgctggccgagcttcgcgcgtggatcgcgcacacgcagcagcggcacatacgggactcggtgagcgcggcctgggacacgtacgacacggaccgcgacgggcgtgtgggttgggaggagctgcgcaacgccacctatggccactacgcgcccggtgaagaatttcatgacgtggaggatgcagagacctacaaaaagatgctggctcgggacgagcggcgtttccgggtggccgaccaggatggggactcgatggcca

SEQ ID NO: 216 - DNA, 4412 bp, Homo sapiens
aacattagatctcaatgaaaaccagaatggaaccctttcactatcataaactcatttataaaagtgcccatgatgaatagcaagaagtacccagtggcccatctcattgaccaaacttagaaagccaaggtggggcatctgcagctctcccacaatctgagtttgtgttgatccttgtaccccacaacctgaaacatcttcttatatatatcgagcgagctctcagcccttctgttttcaaggccatcatggagaaactggagatgtccaagttccagcccactctcctaacactaccccgcatcaaagagactaagccagactatgggggaaagggagataagaaggatcctggaactttaaagagggaaagagtgagattcagaaatcgccaggactggactttaagggacgtcctgtgtcagcacaagggactggcacacacagacacacgagaccgaggagaaactgcagacaaatggagatacaaagacttagaaggacagctcctttcacctcatcctacttgtccagaaggtaaaaagacacagccagaaagaaaaggcatcggctcagctctcagatcaggacaggctgtggatctgtggcggtactctgaaagctggagctgcagcacaccccttttgtattgctcaccctcggtaaagagagagagggctgggaggaaaagtagttcatctaggaaactgtcctgggaaccaaacttctgatttcttttgcaaccctctgcattccatctctatgagccaccattggattacacaatgacatggagaatgggaccccgtttcactatgctgttggccatgtggctagtgtgtggatcagaaccccacccccatgccactattagaggcagccacggaggacggaaagtgcctttggtttctccggacagcagtaggccagctcggtttctgaggcacactgggaggtctcgcggaattgagagatccactctggaggaaccaaaccttcagcctctccagagaaggaggagtgtgcccgtgttgagactagctcgcccaacagagccgccagcccgctcggacatcaatggggccgccgtgagacctgagcaaagaccagcagccaggggctctccgcgtgagatgatcagagatgaggggtcctcagctcggtcaagaatgttgcgtttcccttcggggtccagctctcccaacatccttgccagctttgcagggaagaacagagtatgggtcatctcagcccctcatgcctcggaaggctactaccgcctcatgatgagcctgctgaaggacgatgtgtactgtgagctggcggagaggcacatccaacagattgtgctcttccaccaggcaggtgaggaaggaggcaaggtgagaaggatcaccagcgagggccagatcctggagcagcccctggaccctagcctcatccctaagctgatgagcttcctgaagctggagaagggcaagtttggcatggtgctgctgaagaagacgctgcaggtggaggagcgctatccatatcccgttaggctggaagccatgtacgaggtcatcgaccaaggccccatccgtaggatcgagaagatcaggcagaagggctttgtccagaaatgtaaggcctctggtgtagagggccaggtggtggcggaggggaatgacggtggagggggagcaggaaggccaagcctgggcagcgagaagaagaaagaggacccaaggagagcacaagtcccaccaaccagagagagtcgggtgaaggtcctgagaaaactggccgccactgcaccagctttgccccaacctccctcaacccccagagccaccacccttcctcctgccccagccacaacagtgactcggtccacgtcccgggcggtaacagttgctgcaagacctatgaccaccactgcctttcccaccacgcagaggccctggaccccctcaccctcccacaggccccctacaaccactgaggtgatcactgccaggagaccctcagtttcagagaatctttaccctccatcccggaaggatcagcacagggagaggccacagacaaccaggaggcccagcaaggccaccagcttggagagcttcacaaatgcccctcccaccaccatctcagaacccagcacaagggctgctggcccaggccgtttccgggacaaccgcatggacaggcgggaacatggccaccgagacccaaatgtggtgccaggtcctcccaagccagcaaaggagaaacctcccaaaaagaaggcccaggacaaaattcttagtaatgagtatgaggagaagtatgacctcagccggcctactgcctctcagctggaggacgagctgcaggtggggaatgttccccttaaaaaagcaaaggagtctaaaaagcatgaaaagcttgagaaaccagagaaggagaagaaaaaaaagatgaagaatgagaacgcagacaagttacttaagagtgaaaagcaaatgaagaagtctgagaaaaagagcaagcaagagaaagagaagagcaagaagaaaaaaggaggtaaaacagaacaggatggctatcagaaacccaccaacaaacacttcacgcagagtcccaagaagtcagtggccgacctgctggggtcctttgaaggcaaacgaagactccttctgatcactgctcccaaggctgagaacaatatgtatgtgcaacaacgtgatgaatatctggaaagtttctgcaagatggctaccaggaaaatctctgtgatcaccatcttcggccctgtcaacaacagcaccatgaaaatcgaccactttcagctagataatgagaagcccatgcgagtggtggatgatgaagacttggtagaccagcgtctcatcagcgagctgaggaaagagtacggaatgacctacaatgacttcttcatggtgctaacagatgtggatctgagagtcaagcaatactatgaggtaccaataacaatgaagtctgtgtttgatctgatcgatactttccagtcccgaatcaaagatatggagaagcagaagaaggagggcattgtttgcaaagaggacaaaaagcagtccctggagaacttcctatccaggttccggtggaggaggaggttgctggtgatctctgctcctaacgatgaagactgggcctattcacagcagctctctgccctcagtggtcaggcgtgcaattttggtctgcgccacataaccattctgaagcttttaggcgttggagaggaagttgggggagtgttagaactgttcccaattaatgggagctctgttgttgagcgagaagacgtaccagcccatttggtgaaagacattcgtaactattttcaagtgagcccggagtacttctccatgcttctagtcggaaaagacggaaatgtcaaatcctggtatccttccccaatgtggtccatggtgattgtgtacgatttaattgattcgatgcaacttcggagacaggaaatggcgattcagcagtcactggggatgcgctgcccagaagatgagtatgcaggctatggttaccatagttaccaccaaggataccaggatggttaccaggatgactaccgtcatcatgagagttatcaccatggatacccttactgagcagaaatatgtaaccttagactcagccagtttcctctgcagctgctaaaactacatgtggccagctccattcttccacactgcgtactacatttcctgcctttttctttcagtgtttttctaagactaaataaatagcaaactttcacctattcatgagttattattgaaacctcaaatcataaagacatttaaaagaattgtttttctaactggaggggctctagtgctaaataatagtactgaaaattgatattattttccttttcttatatgaaggaccttatttggcatataaaattttataaaatatgtatttaaagctttttcttattttttgtattaattggtaagtgaaaactctgttaaagatcacaccacaatgttttcaagaaacatctgaaaagataaaacaaagaacaaataacttataatacttacttaaattgacactttttgaaatgccagtctgaaaataattaagatatctctgctttgtatgagtttcttttatgaaacttgataccacgggagtccagtaatattggccacaaaagccagagaaagtaccaagcccagctttgttatcatagccacttcctgccctgcttctgttatttttagtgttttttcagatataaatcggggtccaggaaatcctcaccagaatctggcactgcagccaaaggcgatacttccagagttctagtaggctgctatggaatttctggcatgaaaattcttgacccctcacactttaccccctgtacagca

SEQ ID NO: 217 - DNA, 1907 bp, Homo sapiens
ggcacaggggaatcatcgtgtgatgtgtgtgctgcctttgtgagtgtgtggagtcctgctcaggtgttaggtacagtgtgtttgatcgtggtggcttgaggggaacccttgttcagagctgtgactgcggctgcactcagagaagctgcccttggctgctcgtagcgccgggccttctctcctcgtcatcatccagagcagccagtgtccgggaggcagaaggtaccggggcagctactggaggactgtgcgggcctgcctgggctgccccctccgccgtggggccctgttgctgctgtccatctatttctactactccctcccaaatgcggtcggcccgcccttcacttggatgcttgccctcctgggcctctcgcaggcactgaacatcctcctgggcctcaagggcctggccccagctgagatctctgcagtgtgtgaaaaagggaatttcaacgtggcccatgggctggcatggtcatattacatcggatatctgcggctgatcctgccagagctccaggcccggattcgaacttacaatcagcattacaacaacctgctacggggtgcagtgagccagcggctgtatattctcctcccattggactgtggggtgcctgataacctgagtatggctgaccccaacattcgcttcctggataaactgccccagcagaccggtgaccgtgctggcatcaaggatcgggtttacagcaacagcatctatgagcttctggagaacgggcagcgggcgggcacctgtgtcctggagtacgccacccccttgcagactttgtttgccatgtcacaatacagtcaagctggctttagcggggaggataggcttgagcaggccaaactcttctgccggacacttgaggacatcctggcagatgcccctgagtctcagaacaactgccgcctcattgcctaccaggaacctgcagatgacagcagcttctcgctgtcccaggaggttctccggcacctgcggcaggaggaaaaggaagaggttactgtgggcagcttgaagacctcagcggtgcccagtacctccacgatgtcccaagagcctgagctcctcatcagtggaatggaaaagcccctccctctccgcacggatttctcttgagacccagggtcaccaggccagagcctccagtggtctccaagcctctggactgggggctctcttcagtggctgaatgtccagcagagctatttccttccacagggggccttgcagggaagggtccaggacttgacatcttaagatgcgtcttgtccccttgggccagtcatttcccctctctgagcctcggtgtcttcaacctgtgaaatgggatcataatcactgccttacctccctcacggttgttgtgaggactgagtgtgtggaagtttttcataaactttggatgctagtgtacttagggggtgtgccaggtgtctttcatggggccttccagacccactccccacccttctccccttcctttgcccggggacgccgaactctctcaatggtatcaacaggctccttcgccctctggctcctggtcatgttccattattggggagccccagcagaagaatggagaggaggaggaggctgagtttggggtattgaatcccccggctcccaccctgcagcatcaaggttgctatggactctcctgccgggcaactcttgcgtaatcatgactatctctaggattctggcaccacttccttccctggccccttaagcctagctgtgtatcggcacccccaccccactagagtactccctctcacttgcggtttccttatactccacccctttctcaacggtccttttttaaagcacatctcagattaaaaaaaaaaaaaaaaaaaaaaaaaaaaaaaaaaagggcggccgc

SEQ ID NO: 218 - DNA, 1334 bp, Homo sapiens
tctcagtggtcagaggctgtgttggacccatagtagaattttccagtcacagacccaagcttccatgggttgttactgtgctgtaccacttggtggktctgattctgaacctgatgtgtgtgttaattatattttaagcaacacacacacacacacacgcctcatgtaatggacttttataacaaaagaaaaaatttggatttctaatttacaaatggcaaattatttatccctctctggatgcaccaaagaccagtaaagtttatagcttttccatctatatttataaagcaatactgtattataaaaatcaatatttttatcacatgcttgaaatttttattttgttgttttaaaatgtgcactctaaacatatcagaaccttatttcttcctatgaacttaagctgcctgcgcacaaaaaaaaaaaaaatttaccaaatggagatgcagtagagtccataggctctaaaaactaaaagaaatgggatgcagggggaacaagttatttgtcctgagttactgtacttgcttgacatggttgttgggtactaaatcacaaaagaatccattccaggtatgcatgtctgggggttgggctgtgtctagattagaaactgggtttcaagctttgcatgatgggagagcgtcctctcctctatcagctgcgtgtgttctggataggacagtagcccggagatggaaaccaccttcagtaccattagcccaccataccaagtaacaagttaggcaggaatcgtgggaatttattgagtcagctttgagtgtttgagagaatgtaaacaagattggctcgaattgtaaacgtttgtactttggatgagttcatggttctttaggtcaccttaataccagctatctttggtagaagctacagcattcagtttctctggaaactgtatcacatttttgcattttaaaaattttacagtatcaaaaaaccaaaatctgcttatgaaacaaaacatgaagcaggacatatttggattctatttatttaaaattaaattctttgcaaaattgaacttctcaactaaaacgtgtccatgtcagaattttaactgttagcaggtagtttgtggcaaagatggctaaataatgaagcaaattagaatctgtgtgtatactaatgagctgctttttttctgttgagactatcattatttgtcttattacccaagaggcaattacctgaatttggatgtctgaattataacttatgcaggaatagttctgtaaatacatttaaataaactgtaaagatatttaataaatatagtatttatactaaaaaaaaaaaaaaaaaaactcgag

SEQ ID NO: 219 - DNA, 861 bp, Homo sapiens
gaattcggcacgagcctgagtcaacttgatatccaagctttttacttcaattatctggcaagattacatagactgtcaaagtttgtgaaagtttagcaagaaaactgtcttactcacagaaccacaggactaactgactgaaccacactccaccatttgcccctatttccaggcgttatggtcaccctgtagtttctaatctgtatagatgtgtagagcatgcctcttccctcttcctttcccctccctgttttcctttcctcttgccctttcttaatgtctgtytctattggcttcttgatcttggtctttaatgttcatccttaagcttgcttctctcttcagactactgattcagcctcttgcattttctttcaacttgggccaaaaaaacaggcaacattttcttcctccactacctcatcatcatccaatttattcctttagtttatattaccacaactctcctaaacgtcccaagtctattattaagtctaacaacttagcttcgaacctcaatccaagcatctgacaacacactgaaatgtgcaagcaagagtcccwatggccgggtgcagtggctcatgcctgtaatcccagcactttgggaggccaaggtgggatcacctgaggtcgggagttcgggaccagcctggccagtatggtgaagccatgtctmwactaaaaatacaaaattagccggacattgtggtgcacgtctgtcatcccagcaaggcaggcgaatcgcttgaacccgggaggcggaggttgcggtgagccgggatcgtgccattgcactccagcctggtcaacagagcgagactccgcctcattaaaaaaaaaaaaaaaaaaaactcgtag

SEQ ID NO: 220 - DNA, 587 bp, Homo sapiens
  misc_feature (1)..(1): n equals a,t,g, or c
  misc_feature (587)..(587): n equals a,t,g, or c
natttctcacaatgacaaattctcaaatattgctaatagtactgtggattttcctacattggtaaattgaaggaattgctaaatgctgaattcagcaaccagtttgagattgttgaaaataaagattgtttctttttcaatgcaagttcacagatcactggagttctagctacagtttgttctagaccagaggttgcagatatttttgtcctataaagagacacatggttaatatttttggctttgtgagttgtatagttttccgttgtagctgttcagctctgctacatgaaagcaaccatagaccataccttaacaagtggtcacttttgagtaccaataaaactttatttagaaataacagagggctggatttggtcctagtttgctgaacccttttctagatgaaggctcctcttgccaagactggctccctaccttggctgacaaattctcactttgggacttagtcattgttgctgctctctgttattttgcatgtcttttctcatgtttaggtgctgtgtcttaatacttttttcttacatttaatttaacaatcattactgagcgctggtatgtctagn

SEQ ID NO: 221 - DNA, 477 bp, Homo sapiens
gaattcggcacgaggtgagtatggcttttgtcttccatcttgctcagggtactttggaaccgctatacattgcaggagcttagcttctggttaccatggtttgcttccagagcaacaagcctagtacttcaacatggagacaattatcttttgtttttgttttgttttgtttgttttgtcttggccatgcctttttgagtttacctttttatattttgtccatcattgccatgtgtttggagcagtgggcgttccataacatgaactcactgtaccatcacgaatgggaagtaaggggaaaccttatccatgtggattttactcttccctgattccctaaattgggtttgcaaaatactactgtgcactttcttgatgattcgggcttatctttatgactgtctgtktttgtgtcagactgtaaagaagtataaaagtctttagcttgaaaaaaaaaaaaaaaaaaaaaaaactcga

SEQ ID NO: 222 - DNA, 1930 bp, Homo sapiens
ggcacgagcagaaatgaaaaattacttgagtgggatgagtaggaaaaaaagtggtagtgtcattcaattccagaggaagagatgaatttaatggtgaggttactggcattgggactaatatcagggatgatgtctaatattactcaatcacattcaagtaaaatatcagcctttggtatcttcattggaccagaacagtttctttagatcttcttatttctctttcaagcttcaaccttaaataataggccattgtgtagcagaaaaaactttaaacttagaagtagaaatctataatcaaatcctcagccaacttaaaaacagttgtgtgaccttggataagtcccatagccggactgcattctctaaaccagcagctataacgtttcctacctcattagagtgtggtgtgaatgaaaatgtgaagaatgcctaaaacagagtcaggccttgaatgcattagaaagtttcaggcagccactcattccatcaccctgtctcactctttctagtgacccagggtcacttacctgtttttcttaatacaccccaagtctttctcttgcctctctttgtagaccagaattattcttgtgttcatcaatatggattgagtcaaaaattttcaagatctacctgacttattacttcaaggatccatcatcctctggcttccatttttttgtatttctataggcatggattcaaaggggatatctgactggctcaggctagatccagatgaactcctcctacatttgttgtccatcctggtccaatcagtggcagctaagggagctcagtcacttgtttgaagtttgcccagtcaaggggctgtggaaggaagaggaagttaatctgagacaggattgtgacaggcagaccaataaacatgtctgtttacaatctaaatattcataaaattccaatcccccaaattctcccacatatgtatgctcttgtattcccctgagataggaagggaggcatgctcataaccccattttacagatgggaagaataaagtgccaggaatactggtccctccattagggtcacttaatgagccactggtgaaacaagaaataaatccgaattgagagcttagactgcctggtctcctgttaacaattaagactgcaaaaatttcaaaccatatcgcatgcacaataaatactgcatctgaatcaattgtagagacaaagacagaggcacagggagaagacagatctatccaaggtcactcaagtgaggaaataaaccagcttaaaatagacttctgtctcagcagcattgtgctttcactcctgggcaacttcctgcctatacagcaacattaatgccagcaaggaaggaacctgagggttaaatccttggccccagccccagatagcaatacagaaccccacccccgtaattcagtcaataaatagatgtccctttcatacaagtttcagaaaacacagttaatatacaaccactactcacaaattaaataagttatcttactgtaaaggatataactattttattatctttgcaattaaaatgaaatatgctaaaggtagaagcaatacaaaacagctgctgccagaagtttcaataaaagatcactactgggcacccttataactgtgggaccattaggagatttaaatgtcttcttcactttgcccacggtagggagtgaggctgcactgagaaacatcactggcatgaggtctaattgcctgccctatgattaatgttgccaagtgaattcagaagttgtcacagttctcatcctatggtccaggctcatttataaaatagagcaaagggagcccagtgctttgagaatgccaatgcaaaattataataattacttattacatgatacagttgttaaagtattttctgtgttgttcaaaaaaaaaaaaaaaaaactcga

SEQ ID NO: 223 - DNA, 1021 bp, Homo sapiens
  misc_feature (248)..(248): n equals a,t,g, or c
  misc_feature (1004)..(1004): n equals a,t,g, or c
  misc_feature (1014)..(1014): n equals a,t,g, or c
ttcggcagagcccttgcgcgctcttgaatacctgckttctgtagcgctagttctcttcaagatttgcttagtgtcatttcatttcggtttcttttctcgccatgtttttctgtcggaattacggttcgttttggttctatgtactctctaaaatgttatcgtttttcatttgtctactaattttcgtgcatttgttactactgagtttcttaatatctgactggcctccgcccacgggctctgcagancataaaatactcaggctgatggtagtgcagagactctccctccttgatcagcgcaaacgttggtctgaggcttgagggatggagcaacattttcttggctgtgtgaagcgggcttgggattccgcagaggtggcgccagagccccagcctccacctattgtgagttcagaagatcgtgggccgtggcctcttcctttgtatccagtactaggagagtactcactggacagctgtgatttgggactgctttccagcccttgctggcggctgcccggagtctactggcaaaacggactctctcctggagtccagagcaccttggaaccaagtacagcgaagcccactgagttcagttggccggggacacagaagcagcaagargcacccgtagaakargtggggcaggcagargaacccgacagactcaggctccrgcagcttccctggagcagtcctctccatccytgggacagacagcaggacaccgaggtctgtgacagcgggtgccttttggaacgccgccatcctcctgccctccagccgtggcgccacctcccgggtttctcagactgcctggagtggattcttcgcgttggttttgccgcgttctctgtactctgggcgtgctgttcacggatctgtggagctaagcagccttagatagcagcagaaggctttttggattctcctccttgaaaagattctcagttaccaaacgtctccacctagaaaataaaaatacattaagatgttganaaaaaaaaanaaaaaaa

SEQ ID NO: 224 - DNA, 727 bp, Homo sapiens
gctggtatctccagtgtttgggtttagctccaacttacaggttaggaccagcttttctgcaggtgttgaccagcaatttcctgcggcatttacttcttgataacaagagtgagaagatagagacagggcagatagacacttaagagtaaaatgtattaacacaaaggctctggccgcccccctacaaaggaggccatggaaccgatggaactgatggaggaaatgctgggactgtgggtcagtgctgacacacccatggccatacgtttggtcttcttggccttggctgggctggtggatgggaagccagtatggatcaccttgtggatggatgcaaagagaccaaacttggcgggcactggaagtacctggggaagcaggagagactcacactgctgtcatggccccacagcctggagcctcccctgcctcctctgcctcttcagagcccagcagaaagacagagaaagaagcctccttggggttccattacccacactccaaggtggaaatctttcagatggttagatgatgaaggtagtagaaggcaaggatgattgggagtagaaggaagagtgacaggctagcatgagctgtgcagcagcaagattccatatgagcaaagttcagaaagtgrgmmaaaaggaccaagttggatctcctcctaaccctgacctgcatgatatgggtgtgagaagcttcaactgagaaagctgctgagaaagta

SEQ ID NO: 225 - DNA, 1256 bp, Homo sapiens
ggcacgagccgtgtggccaggtaccatccagtctgctggggaccccaggaagaacagaagcagagaaaaggtgaaaatgtcaatttatgtgcgaaggctggctacatccaatcttcctctattgttgtttttggacaacgaccccaagctgctcagcctttggaatcctggatttacaccagcagcaccctatccccaccccttcctcctggttctcaggcctttgtccttggactgagttacatcattgtcttcgctgattctaaaccttgggacttggactgagctaccagcatctcagggcctctagtttgcagatggcctgtcaagggacttagtctccaaaattgcaggagccagtttccctaataaatcccaatgtgatagttcttatcccacaggcccactttagttcagtttagttttgctttgtttttagaaatggggtcttgctctgttgccccagctgtagtgcagtggctcactccagcctcaaactcctgggctctggcgatcctcccaactcagcctcctgagtagctgggattacaggtgcacaccaccatgcccagctactttttaattttttttttttgagacagagtcttgctctttcacccaggctggagtgcagtggcgtaatctcagctcactgtaacctctgcctccctagtggctgggaccgcagatgtgtgccactgcacccagctaattttttgttttcggtagagacagggctttgccgtgttggccgggctggtcttgaactcctggcctcaagtgacccacccacatcgacctcccaaagtgctgggattacaggcgtgagccatctcacctgcctactttttaaattttttgtagagacagggtcttgctatattgcccaggctaatctcgaacacctggcctcaagcgatcttcccatctgggcctctcaaagtgctgggattacaggcaggagccccttaaccaacttcgagaacttgggaaataagatgtggtgggttcttgccaccgtgagccaaacctgggtcagaacttcatgtgtgatctggcccctacatacacccactctgataggatattatgacactttggataacaatgtcgatttggaccttgtgtcccacaggtcttaaaatatttggttattccacttttcccagtgtatagttaccagagcaaatgatagttccctttggagaagtattaagggatcattaacaaatactaacaaaaaaaaaaaaaaaaaa

SEQ ID NO: 226 - DNA, 3466 bp, Homo sapiens
  misc_feature (3462)..(3462): n equals a,t,g, or c
  misc_feature (3466)..(3466): n equals a,t,g, or c
acatgaacgaggttgcaagttagatgttaagtagatcctctccctgtgttttcacctgggaatgctgggttggtagtaatcctccccagatgtggaggactgaagaggggskggccttggggggggtgtggttctggtctgctcagcgcatggactgttccctgtgtgtctgtgcgtgcctgcaattgggggtggtgtccaggggctcagcaaggcatgtacacctgggctggggtgtgtcagacgctgtcagtgacaagcaccttccctcagagcccggttcctggagaatgtggcggcagcagaaacagagaagcaggttgcgctggcccagggccgggcagagacacttgccggggccatgcccaatgaggcgggtggacacccaggtgagtaggtgggtgagcaggcagagcctgcctgttgytttgttgccccacagggggcatggcaytgacagctccttccctttctttagatgcccggcaactctgggactccccagagacagcccctgcagccagaacaccccagagccctgccccctgtgtcctgctccgggcccagcgaagccttgcaccagagcccaaggagccactgataccagcaagccccaaggctgagcccatctgggagctccctacccgtgcacccaggctctctattggggacctggacttttcagatctaggggaggatgaagaccaggacatgctgaatgtagagtctgtggaggctgggaaagacatcccagctccctcacccccactgcccctgctctcgggagtacccccccctcccccacttccacctcccccacccatcaaaggccccttcccaccacctccacctctacctctggctgcccctcttccccattcagtgcctgacagctcagccctccccactaagaggaagacagtaaaacttttctggcgtgagctgaagctggctgggggccatggagtctctgcaagccgctttgggccctgcgccaccctctgggcttcactggaccctgtctcagtggacacggcccgactggaacacctctttgagtctcgtgccaaagaggtgctgccctccaagaaagctggagagggccgccggacaatgaccacagtgctggaccccaagcgcagcaacgccatcaacatcggcctaaccacactgccacctgtgcatgtcattaaggctgctctgctcaactttgatgagtttgctgtcagcaaggatggcattgagaagctactgaccatgatgcccacggaggaagagcggcagaagattgaggaagcccagctggccaaccctgacatacccctgggcccagccgagaacttcctgatgactcttgcctccattggcggcctcgctgctcgtctacaactctgggccttcaagctggactatgacagcatggagcgggaaattgctgagccactgtttgacctgaaagtgggtatggaacagctggtacagaatgccaccttccgctgcatcctggctaccctcctagcggtgggcaacttcctcaatggctcccagagcagcggctttgagctgagctacctggagaaggtgtcaraggtgaaggacacggtgcgtcgacagtcactgctacaccatctctgctccctagtgctccagacccggcctgagtcctctgacctctattcagaaatccctgccctgacccgctgtgccaaggttagcacctgccagaatcaaccaaggccggacaaggcatgaggagcgctgcttcctgggcctggctcctcccccttctccccatttgggctgctgtgccagggcttgctccagccacctgggtgtgagctatgccctctgccagaaatgctctttcctctattggcctggccacacctactcagtctttgggtctgtttaactgccacttcccccagtaaaccttctgctccccattcacatcagatggacttgtgtctcttgcactagtctatgagatttggatgtctgtgtccttagggcccaagctggccactctggcccagaagcagcctcgggccatgtyttgtytacagggtgtggggggacagtatgtgcacccccttgctttctcaggtggactttgaacagctgactgagaacctggggcagctggagcgccggagccgggcagccgaggagagcctkcggagcttggccaagcatgagctggccccagccytgcgtgcccgcctcacccacttcctggaccagtgtgcccgccgtgttgccatgctaaggatagtgcaccgccgtgtctgcaataggttccatgccttcctgctctacctgggctacaccccgcaggcggcccgtgaagtgcgcatcatgcagttctgccacacgctgcgggaatttgcgcttgagtatcggacttgccgggaacgagtgctacagcagcagcagaagcaggccacataccgtgagcgcaacaagacccggggacgcatgatcaccgaggtgggtgcccttccaggtcttagtcttgactgccacctccttggtttccttcgctcctcccagctcacccttcttctttctccagacagagaagttctcaggtgtggctggggaagcccccagcaacccctctgtcccagtagcagtgagcagcgggccaggccggggagatgctgacagtcatgctagtatgaagagtctgctgaccagcaggcctgaggacaccacacacaatcgccgcagcagaggcatggtccagagcagctccccaatcatgcccacagtggggccctccactgcatccccagaagaacccccaggctccagtttacccagtgatacatcagatgagatcatggaccttctggtgcagtcagtgaccaagagcagtcctcgtgccttagctgctagggaacgcaagcgttcccgcggcaaccgcaagtcttgtaagtaaccccccacaatcccactgcccacctgaaccccatcaaccccctccaaccctgctctgtccctgcagtgagaaggacgttgaagagtgggctcggagatgacctggtgcaggcactgggactaagcaagggtcctggcctggaggtgtgaaggtgctgtatcccggaaatctatctggaccctggactgcagtgcaggagatgacagagtgaggagggcccagagcagaattctggccccagaactctgtgcccaggagccatgccttgagcagtattagccgtgtgtgtatgcatgtgagtgtgtgtgtatgtgtgtgtgtgcatgcatatgcatgtgcatgtgtgtgagctccttgaacgcacggagcaaaataaaattttcttagctaatccaaaaaaaaaaaaaaaaaaaaaaaaaaaaaaaaaaaaaaaaaaaaaaaaaaaaaaaaaaaaaaaaaaaaaaaaaaaaaaaaaaaaaaaaaaaaaaaaaaaaaaaaaaaaaaaaaaaaaaaaaagngggn

SEQ ID NO: 227 - DNA, 1238 bp, Homo sapiens
ccacgcgtccgcccacgcgtccgcccacgcgtccggctgcggcgcgatggcggcggggctggcgcggctcctgttgctcctcgggctctcggccggcgggcccgcgccggcaggtgcagcgaagatgaaggtggtggaggagcccaacgcgtttggggtgaacaacccgttcttgcctcaggccagtcgcctccaggccaagagggatccttcacccgtgtctggacccgtgcatctcttccgactctcgggcaagtgcttcagcctggtggagtccacgtacaagtatgagttctgcccgttccacaacgtgacccagcacgagcagaccttccgctggaacgcctacagtgggatcctcggcatctggcacgagtgggagatcgccaacaacaccttcacgggcatgtggatgagggacggtgacgcctgccgttcccggagccggcagagcaaggtggagctggcgtgtggaaaaagcaaccggctggcccatgtgtccgagccgagcacctgcgtctacgcgctgacgttcgagacccccctcgtctgccacccccacgccttgctagtgtacccaaccctgccagaggccctgcagcggcagtgggaccaggtagagcaggacctggccgatgagctgatcaccccccagggccatgagaagttgctgaggacactttttgaggatgctggctacttaaagaccccagaagaaaatgaacccacccagctggagggaggtcctgacagcttggggtttgagaccctggaaaactgcaggaaggctcataaagaactctcaaaggagatcaaaaggctgaaaggtttgctcacccagcacggcatcccctacacgaggcccacagaaacttccaacttggagcacttgggccacgagacgcccagagccaagtctccagagcagctgcggggtgacccaggactgcgtgggagtttgtgaccttgtggtgggagagcagaggtggacgcggccgagagccctacagagaagctggctggtaggacccgcagggaccagctgaccaggcttgtgctcagagaagcagacaaaacaaagattcaaggttttaattaattcccatactgataaaaataactccatgaattctgtaaaccattgcataaatgctatagtgtaaaaaaatttaaacaagtgttaactttaaacagttcgctacaagtaaatgattataaatactaaaaaaaaaaaaaaa

SEQ ID NO: 228 - DNA, 1481 bp, Homo sapiens
gcgcactggatggctggggccgcccggatcgccgccgccgccgccgcacgtacgtggcatgcctggatgtccctgccctggctgtggcatggcgggcccaaggctcctcttcctcrctgcccttgccctggagctcttgggaagggctgggggttcccagccggccctccggagccgggggactgcgacggcctgtcgcctggacaacaaggaaagcgagtcctggggggctctgctgagcggagagcggctggacacctggatctgctccctcctgggttccctcatggtggggctcagtggggtcttcccgttgcttgtcattcccctagagatggggaccatgctgcgctcagaagctggggcctggcgcctgaagcagctgctcagcttcgccctggggggactcttgggcaatgtgtttctgcatctgctgcccgaagcctgggcctacacgtgcagcgccagccctggtggtgaggggcagagcctgcagcagcagcaacagctggggctgtgggtcattgctggcatcctgaccttcctggcgttggagaagatgttcctggacagcaaggaggaggggaccagccaggcccccaacaaagaccccactgctgctgccgccgcrctcaatggaggccactgtctggcccagccggctgcagagcccggcctcggtgccgtggtccggagcatcaaagtcagcggctacctcaacctgctggccaacaccatcgataacttcacccacgggctggctgtggctgccagcttccttgtgagcaagaagatcgggctcctgacaaccatggccatcctcctgcatgagatcccccatgaggtgggcgactttgccatcctgctccgggccggctttgaccgatggagcgcagccaagctgcaactctcaacagcgctggggggcctactgggcgctggcttcgccatctgtacccagtcccccaagggagtagaggagacggcagcctgggtcctgcccttcacctctggcggctttctctacatcgccttggtgaacgtgctccctgacctcttggaagaagaggacccgtggcgctccctgcagcagctgcttctgctctgtgcgggcatcgtggtaatggtgctgttctcgctcttcgtggattaactttccctgatgccgacgcccctgccccctgcagcaataagatgctcggattcactctgtgaccgcatatgtgagaggcagagagggcgagtggctgcgagagagaatgagcctcccgccagacaggagggaggtactcagctggcccactccacagccaggcctggccctgcccttcaccgtggatgttttcagaagtggccatcgagaggtctggatggttttatagcaactttgctgtgattccgtttgtatctgtaaatatttgttctatagataagatacaaataaatattatccacataaaaaaaaaaaaaaaaaaactcga

SEQ ID NO: 229 - DNA, 1341 bp, Homo sapiens
caggaattcggcacgagagtctgtggtcctctgtatctcaactttttcatcttaaaaaaacaaatagggttgtgtgtgtggctggtggtcataaggtcctttctggctctaataacctgagcttctgttatgaagctgggacccttagagcctcaggatgatcctctgtttgtttgtgaagccccaatcaggtgctaagcaccatagtggcacttagctgaagctcctctgtaactcctgtgggccctgccttgcccacccccgacagctgctgcagtgctcctgagcagcacaggcctgatggagcttctggagaagatgctggccctcaccttggcaaaggcagattctcccaggactgcactcctctgctctgcctggctgctcactgcctccttctctgcccagcagcacaagggcagtttgcaggttcaccagacactctctgtggaaatggaccaagtattgaaggctctcagctttccaaagaaaaaggctgcactactctcagctgccatcttatgcttcctgcggacagccctgcgacaaagcttttcctctgccctggtagccctggtgccctcaggggcccagccactgccagccaccaaggacactgtcctagctccactgcgaatgtcgcaagtccggtccctggtcattgggctgcagaacctcctggtgcagaaggaccctctattgtcccaggcctgtgttggctgcctggaggccttgcttgactacctggatgcccggagcccagacattgctctccacgtggcctcccagccttggaatcggtttttgctgtttaccctcttggatgctggagagaattccttcctcagacctgagattttgaggctcatgaccctgtttatgcggtaccggagtagcagtgtcctctctcatgaagaggtgggtgatgttctgcaaggtgtggctttggctgacctgtctaccctctcgaacaccacactccaggccctgcatggcttcttccagcagctccagagcatgggacacctggctgaccacagcatggcccagaccctgcaggcctccttggagggccttccccctagcacctcctcaggccagccacccctgcaggacatgctctgcctgggaggggtggctgtatccctgtcccacatcagaaactgatcctcaggacttgaaggcccagaagtggagagagaatgagacctggagacaaagggcataattgttggggaaatggatgacagctgaagctattcatatggagccatatactctattgttgaaatagaataaggaaataaaatgatacactcacataaaaaaaaaaaaaaaaaa

SEQ ID NO: 230 - DNA, 912 bp, Homo sapiens
tcgacccacgcgtccggtcagccagtcgcatccagccatgacagccttctgctccctgctcctgcaagcgcagagcctcctacccaggaccatggcagccccccaggacagcctcagaccaggggaggaagacgaagggatgcagctgctacagacaaaggactccatggccaagggagctaggcccggggccakccgcggcagggctcgctggggtctggcctacacgctgctgcacaacccaaccctgcaggtcttccgcaagacggccctgttgggtgccaatggtgcccagccctgarggcagggaakgtcaacccacctgcccatctgtgctgaggcatgttcctgcctaccatcctcctccctccccggctctcctcccagcatcacaccagccatgcagccagcaggtcctccggatcacygtggttkggtggaggtctgtctgcactgggagcctcargarggctctgctccacccacttggctatgggagagccagcaggggttctggagaaaaaaactggtgggttagggccttggtccaggagccagttgagccagggcagccacatccaggcgtctccctaccctggctctgccatcagccttgaagggcctcgatgaagccttctctggaaccactccagcccagctccacctcagccttggccttcacgctgtggaagcagccaaggcacttcctcaccccytcagcgccacggacctytytggggagtggccggaaagctcccsggcctytggcctgcagggcagcccaagtcatgactcagaccaggtcccacactgagctgcccacactcgagagccagatatttttgtagtttttatkcctttggctattatgaaagaggttagtgtgttccctgcaataaacttgttcctgag

SEQ ID NO: 231 - DNA, 839 bp, Homo sapiens
  misc_feature (1)..(1): n equals a,t,g, or c
ngaacccagaagatgctgcctctcctgatcatctgtctcctgcctgccattgaagggaagaactgcctccgctgctggccagaactgtctgccttgatagactatgacctgcagatcctctgggtgaccccagggccacccacagaactttctcaaagtattcactccttgttcctagaggataataattttctcaaaccctggtaccttgatcgtgaccatttggaagaagaaacagccaaattcttcactcaagtacaccaagccattaaaacgttacgagatgataaaacagtacttctggaagagatctacacgcacaagaatctctttactgagaggctgaataagatatctgatgggctgaaggagaagggagccccacccctctccatgaatgccttcccggctccatctcctacttgcaccccagaaccccttggctctgtctgcctccccagcacctcagtttctctaccttctcaccctccctggcagcctgcaatgagtcctgtgccaggaaccggcggacctccctgtgggctgtgagtctcagcagtgctctactcctggccatagctggagatgtttcttttactggcaaaggaagaaggaggcagtaaaggaacagggcagcccgcatgtcttccagaagtgaacagaggccgcagctaccaccgtcacaaagttcactcatctctgggtcccggtgaccccatccccccataccctccatcctgggtcctggggccccaaagctctgaggcctaggagactgcgctgtctcgtggtttgcctactcctacacctttgtaaagagtctcttcattaaaacccct

SEQ ID NO: 232 - DNA, 1022 bp, Homo sapiens
cgctcctgccgccgggaccctcgacctcctcagagcagccggctgccgccccgggaagatggcgaggaggagccgccaccgcctcctcctgctgctgctgcgctacctggtggtcgccctgggctatcataaggcctatgggttttctgccccaaaagaccaacaagtagtcacagcagtagwgtaccaagaggctattttagcctgcaaaaccccaaagaagactgtttsctccagattagagtggaagaaactgggtcggagtgtctcctttgtctactatcaacagactcttcaaggtgattttaaaaatcgagctgagatgatagatttcaatatccggatcaaaaatgtgacaagaagtgatgcggggaaatatcgttgtgaagttagtgccccatctgagcaaggccaaaacctggaagaggatacagtcactctggaagtattagtggctccagcagttccatcatgtgaagtaccctcttctgctctgagtggaactgtggtagagctacgatgtcaagacaaagaagggaatccagctcctgaatacacatggtttaaggatggcatccgtttgctagaaaatcccagacttggctcccaaagcaccaacagctcatacacaatgaatacaaaaactggaactctgcaatttaatactgtttccaaactggacactggagaatattcctgtgaagcccgcaattctgttggatatcgcaggtgtcctgggaaacgaatgcaagtagatgatctcaacataagtggcatcatagcagccgtagtagttgtggccttagtgatttccgtttgtggccttggtgtatgctatgctcagaggaaaggctacttttcaaaagaaacctccttccagaagagtaattcttcatctaaagccacgacaatgagtgaaaatgatttcaagcacacaaaatcctttataatttaaagactccactttagagatacaccaaagccaccgttgttacacaagttattaaactattataaaactc

SEQ ID NO: 233 - DNA, 1028 bp, Homo sapiens
gcatgatcctgtggaacacagtttgggatcatagatgtgaattaagacaccaccgagatacgggctgtgaggttcataccgtgctgatagcactcgtggtgtctgtgaaatgtgggtaagacattcaaacctggttttgatactggaaactcttcctttaaaactgtgaccatgatttcattcagcccctccacacccctatgtctgccttgtttcagagtgagttttctatggagcctgtggcccttttgcagcccacctggtggcttcttaatgtaactcttcccctggtcgcctggagtggaccactcatctgcaggcctctcctgcatggggagggtaggcagggagcagcatgtctgcaggggtgaacctttgctcttctgtcaggcgaggcccaggctgcaccagccacctgccacatggtgacagtgccacgggccctgcgtatggcccctgcaaccgtgctctggcgggcacacctggctgctgcaggccaaggccgctgttcagtgaagagtcccatgtttagtatggactaaagtcccatgtttagccaytgccccagtctcccgtgaccccagaaaccaggtcactggaccacagtgccagatcctcatcacgccggtgagcacctagaagtgagaacactgtattcctacaatgtacacttggatatttctccttatttagtttctagtgaaacaaatcaagtaaggaactatctttagtttagatggaattatttgtttttaattgttgccgtattcatctatatagctaatatttcaagataagtaatgaacaaaacctgtctaaaccttttgtttccaatgaatgaaagtcatgcactttatttataggctctatgttttggcttctgcagtacttttattatctatacataatttggccaaaaataagaaattggaaagaatgaaatgtttagtttatagtagaagaaagatgatgacactaagttgtgaaaatatgttgtgatttttatgaaataaactcacggcacgtag

SEQ ID NO: 234 - DNA, 450 bp, Homo sapiens
tttttttactcgaaaaaatgtttaatagaatttaaaattttaacttcagggaatttggaagttcaatcattctcaaagaggctgtaaggatgattaaaatcctgaaggaagccattgaagaaacttccttctgctctttctggaggatctcttttcaattatctattcatcatatatttcttatcttctgtgcacaattgacaactcttctttacagcacattcctcttyattcccatctcttggtttctgattgttcctggggctgtggataaaaccattctctgagaagctgataagcaattggatgagaaagarggagargaaaactggcaggargatctggscccatgcccgcagccagcacatctctcttcagacctggtgaccccagccactgggaacctggcaggcaccagctacagtgttggacactgctcgtgccgaattc

SEQ ID NO: 235 - DNA, 1094 bp, Homo sapiens
  misc_feature (1)..(1): n equals a,t,g, or c
nacccattgagcagaaggaggccaggtgggaaagctcctgggaagagcagccagactggacactgggctgcttgagtcctgagtcacaattcagaattcctgggctccctgggtgcattctatcattccagttgaaagtttgcttccttccagtcatgtggctcttcattctactctccttggctctcatttcagatgccatggtcatggatgaaaaggtcaagagaagctttgtgctggacacggcttctgccatctgcaactacaatgcccactacaagaatcaccccaaatactggtgccgaggctatttccgtgactactgcaacatcatcgccttctcccctaacagcaccaatcatgtggccctgagggacacagggaaccagctcattgtcactatgtcctgcctgaccaaagaggacacgggctggtactggtgtggcatccagcgggactttgccagggatgacatggattttacagagctgattgtaactgacgacaaaggaaccctggccaatgacttttggtctgggaaagacctatcaggcaacaaaaccagaagctgcaaggctcccaaagttgtccgcaaggctgaccgctccaggacgtccattctcatcatttgcatactgatcacgggtttgggaatcatctctgtaatcagtcatttgaccaaaaggaggagaagtcaaaggaatagaagggtaggcaacactttgaagcccttctcgcgtgtcctgactccaaaggaaatggctcctactgaacagatgtgactgaagatttttttaatttagttcataaagtgatgctacaacagaataatcaccatgacaactggcccacacctcagagactgattctgatctcccaggaattctgaaggaccctctatccttgacaacaatcatttgcagccaggtagcaacggcggtagtcagaggagctatgatagaccacacccaagcaaggctgccctcaaataacatctcaagatcttagttcttatgcattccatcagtcagaagtgaagaagaggtggagaatctggattggggaccaggaaatcacttgtattttgttagcca

SEQ ID NO: 236 - DNA, 808 bp, Homo sapiens
tgcaggaattcggcacgagattacaacacatcagaacaaaatgttatggactaccatggagcagaaatcgtgagccttcgtttgctgtcactagtaaaagaagaatttctttttctcagccccaacctagattcacatggactgaaatgtgcatcttctcctcatgggctggttatggttggagttgctgggactgtccatcgaggaaacacttgtttgggcatttttgaacaaatttttggactcatccgctgcccttttgtggagaatacttggaaaatcaaatttatcaacctgaaaattatgggagagagttcccttgctcctggaacattaccgaaaccatctgttaaatttgaacaaagtgatctagaggccttttataatgtaatcactgtatgtggtaccaatgaagtacgacataatgtaaagcaggcttcggatagtggaactggggaccaagtttgaggtagtggaaatgagacattgctgaacaaaagagaactgggtttacctgaccctctaaagcgctaagtactgtcagcctgaaaaaaatcttctatacagaaactcttccaaatactatatcagtaatgtctgaatgatttcagatgtgaaaattgacatattttagttgaaatacctttctggactacagacttacatatcatgtgaatacttacctatttctacccgagttgcagcaagtattctgaaagcttaatgcaaataaatcccactttagatcttaaaaaaaaaaaaaaaaaaaaaaaaaaaaaaaaaaaaaaaaaaaaaaaaaaaaaaaaac

SEQ ID NO: 237 - DNA, 1898 bp, Homo sapiens
  misc_feature (1398)..(1398): n equals a,t,g, or c
  misc_feature (1428)..(1428): n equals a,t,g, or c
ggcacgaggtctccatggcgttagaagtcttgatgctcctcgctgtcttgatttggaccggtgctgagaacctccatgtgaaaataagttgctctctggactggttgatggtctcagttatcccagttgcagaaagcagaaatctgtatatatttgcggatgaattacatctgggaatgggctgccctgcaaatcggatacatacatatgtatatgagtttatatatcttgttcgtgattgtggcatcaggacaagggtagtttctgaggaaactctcctttttcaaaccgagctgtactttaccccaaggaatatagatcatgaccctcaggaaatccatttggagtgttccacctctaggaaatcagtgtggcttacaccagtttctactgagaatgaaataaaattggatcctagtccttttattgctgactttcagacaacagcagaagagttaggattattatcttctagtccaaacttgctctgagctaaaggagaaatggaaacttgaagctggtgttatgtattttgcaggaaaacagtttcattttttcatagcaaaaatatagttggtgtatatctctccttaagtctctggtttctaaaaaccctacttcagtaaaggtcctgattagttgattagtgaatgtgtatttctaaatatttgtattcagtaggggtatggctgattaatttaacattaactattaggtaattcatattatacatttaagttctttctgttctgtgtagaagattcagaaatatgtcttcaaagacaatgacttgatctaattgataagaacctccaataaatatgttctaatatttttcaggaagaataaagaatagagagagacatataaatgtgcaagaggcaaaactttgagcatagtgtaaaatttaacatattaactctcacgaaaggcaaaatccttttatgtgcagatactttaattcatgtagattttcctattaatcagtaaagttgaatcctaacaataatgccatgtgacaacctatttagattattccagaattaaattcaatttattttctagagctcaagtaaccactactttaactgaaatttgatgttaggtttcccttgttcctccgaatggttcttccacactcaaaataattgaatggttgagttggttaagcaaagagttatcctgccacctaagagcattcattaaatgattatttattaccacctactttatactatcttcctttctttaaacatggagtctaaatatgtaatatatcaaaaaatacttctgatttggtagatttcttatatcaagggtgagaattgaactgtgccattggctattcaatagcttattgaatgtatgttttggatgccacatcctcctggaagcaanttttgccaagatactgtttattattatttntaattaaagtgatactattccattttcaattaaatgctgtctgtagctgttaacttgtcagataaagaatttgaccctgtcatagtgaacatctgtctttaccagttaacatgcagctaagaggtaatacttctatgggacttcctaagggtcagaatatggtacaagtacattgcgataaattatttaatcttcttaaagagtgaaatatatcatgattatcccaattttacagataagcaaacagaggttaaatcatttgcctgagtcacataacttgttggtgttggttcaagatttaaaatagggcaatctgcctttagatctgtctctatactctctctttgtatattagccactatactctactgcttggaatcatcttaagttgctgaactttagttctctagaaaacaattgctattcaagcagttatacaactctcaataaaacttaaagttgaaaaaaaa

SEQ ID NO: 238 - DNA, 818 bp, Homo sapiens
aaaacttgagtatgttgagggaaggaatatatatatatctgggagagaatggatacgttttgtttttctgaaatggaattagaaagatgttcagttgtcttgtgcattcttgcaaaccttgcagttttgagagccctgtttctgccttgtatcattttccactgtgtatckgattctaggagcgtgaacagggagacaaaggtgaagtttgtgcacacctctgtccatggggtgggtcatagctttgtgcagtcmgctttcaaggcttttgmccttgttccycctgaggctgttcctgaacagaaagatccggatcctgagtttccaacagtgaaatacccgaatcccgaagaggggaaaggtgtcttggtaacctaatttttttttaaattatgaaatctgcttttatattcaaaactattactgtcaagtaaaatacatttttatgtgttttcattgtgctgaagaaaaactaatttcagcatggaaatatgtatgtttggctgggtgcagcgtctcatgtctgtaatcccagcactttgggagaccaaggcaggcagatcacttgaggtcaggtgttcgagaacagcctggccaacatggcaaaaccctgtctctactaaaaatacaaaaattagctgggtgtggtggtacatgcctgtaatcccagccacttgggaggctgaggcactagaattgtttgaacctgagagatggaggttgcagtgagctgagattgcaccactgcactccagcctgggtgacagggtgacagagcgagactctgtctcaaaaaaaaaaaaaaaaaaaaactcgag

SEQ ID NO: 239 - DNA, 1558 bp, Homo sapiens
gcacatgcggccttgcagctctccttacgcacatgcgggccttgtagctctccttacccacatgcgggccttgccgctctccttacccacatgtgggccttgcagctctccttacccacatgcggccttgcagctctccttacccacatgcggccttgcagctctccttacccacatgcgggccttgccgctctccttacccacatggggccttgccgctctccttacccacatgggggtcttgcagctgtccttacgcacatgcgggccttgcagctctccttacccacatggggccttgcagctctccttacccacatgcggccttgcagctctccttacccacatgcgggccttgcatgctgttggctctggagcctctcgtctcacaggtctctacaggtgcaggccactcaccgtctggtggtcaggaccataaaggacagggttatgttaaaggttttgcctcaaaccagaaggcgaggaccctttctgtccagttgccggaatgatgtcatgaggaactgtgtgcccaggcacgctgtgctagttacaacatgtgtttttgtttcattccccacacactgtaaggtgggcatcactgggcccatcacacaggtgaaacagaagcccgggaatcactcgtccccttgcccagtcatacaactagtagccaaggcagaatttgaactcatgttgccctcagtcccaaaacctgtgtacttaacccttgttctctcctgctggtgtctgtgtgatgtcccatgtctgtctgtctctctctaaagggacagtgacacaccaggaggatacccagatgctggggggccttgggacagagtctgggaggattgagtgaaggagcaggtgagggtgagcctggagagagaacgccctggtggagagtttatgtagaaaggggattaggtctccgggaggaaccggatccatgtggtctgctgagatggctgagtctggcattcagatgtgccacccaacagaagaggccctggagggacgccccctttgctgggtggcagccgtgggattccggggtctgccttggaggtcctggagaggatgtcgtggccctggccctagactcaagctgcctgggtccagttcagcccggccactcctgctgtgggccctagccaggggccttcactccaccgactgctgtgtgtttggtacatggtgtcacccaggccatgtgcttagcaatgtgcctgacagccagtgccggtgtcagccattacagggacacacgtgcctggaggttgaggccacgttctgtcacctaggcccgctcgtggtcctgggctgggccaaacccccctttgaaaggattcctttttgcccctggcataggctctcattgtcctagtgaacagctacatctttttaacaagccagaaaaggccagctggcagtggctctgcctgaaatcccaagactggctggccgaagcaggaggatcacttgaggccagcctggccaaagtaagcaagactctgtctctacaaaaaaataacaaaaaaaaaaaaaaaaactcgag

SEQ ID NO: 240 - DNA, 3435 bp, Homo sapiens
  misc_feature (760)..(760): n equals a,t,g, or c
cgagcagcatcagaaagtacgawtctgctctgagggcgratgraaaatgaagawtctgacgtaaagcctccagactkgccaaacccaatgaatgctacctcccagtttcctcagcctcagcactttgcagctttggcctccgtctgcctcgggatatcacagagctgcccgagtgragtaggggtaccccttctacatggccatgggcttcccagggtatgacctctcggctgatgacatagctgggaagtttcagttcagccggggcatgcgccgcagttacgacgcagggttcaagctgatggtagtggaatatgctgagagtaccaacaactgccaggctgccaagcagtttggagtattggaaaaaaacgttcgagactggcgcaaagtgaagccacagcttcaaaacgcccacgccatgcggcgggcattccgaggccccaakaatgggaggtttgctctggtggaccagcgtgtggccgaatatgtcagatacatgcaggccaaaggggaccccatcacccgggaggcgatgcagctgaaagctctcgaaatcgcccaggaaatgaacattccagagaaagggttcaaggcaagcttgggttggtgtcgaagaatgatgagaaggtatgacctgtctctgaggcataaagtgcccgtgccccagcacctgccggaagacctgactgagaaactcgtcacttaccagcgcagtgtcctggctctgcgcagggcgcatgactatgaggtagctcanatggggaatgcagatgagacgcccatttgtttagaggtgccatcacgggtaactgttgataaccagggcgaaaagcctgtcttggtcaagacaccaggcagggaaaaactgaaaatcacagcaatgcttggtgtcttggctgatggraggaagttaccaccgtacatcattttraggggaacatatatccccccggggaagtttcccagtgggatggaaattcgctgccaccggtatgggtggatgactgaagacttgatgcaggactggttggaagtggtgtggagacggaggacaggagcagtgcccaagcagcgagggatgctgatcttgaatggcttccggggccatgccacagattccgtgaagaactccatggaaagcatgaacactgacatggtgatcatsccagggggtctgacctcacagcttcaggtgctggatgtcgtggtctacaagccactgaatgacagtgtgcgggcccagtactccaactggcttctggctgggaacctggcgctgagcccaaccgggaatgctaagaagccacccctgggcctctttctggagtgggtcatggtcgcgtggaatagcatctcaagtgagtccatcgtccaagggttcaagaagtgccatatctccagcaacttggaggaggaagacgatgtcctgtgggaaatcgagagtgagttgccaggaggaggagaaccaccaaaagattgtgacaccgaaagcatggctgagagcaactgaagggaaagggaaagcaaatggaactctgatttaaacagctggggatgaaattcctcaagatgattattcctgaaagtgtggatgcgctggatgcgcagggaacatcaggaaaaggccacggggctctgaacagccccggtccagacagcagcctgtacatccatcccaggacacagcccagcccctccccacaccatacaaggtatcagaaaagtctaggacctatcatttcatcagagacatgatcagaaaagaaactgcttctgccccatttcttgttttggagattactccatctgtccatcaaaagaaacctgtaaatatgaaagaacaaaggttatttcctggagaaaagacaatttattcaacaccaacaagggactcatcatatgggcacaactctggtgtccttctatggagaaaacctcaagtaaagttttattctgcctttgaaaatgcttccaaaagtagaccctgtccccacacaggtcaagactacagagaaggctttgtagaaatgtgtcacctatgtacacctgctacttacacatttcctcttttggaaaaatgagatacttagaataacaagaaaattaagacatactggcctggtgccagcagatggcttttctatagacaaactaggttagtgtggaagatataggttaaaataaactatgctgttttatttatcttcccaacctgattggcagctagacttttttagggtctcatttaatggccctgtttttttcattattatatttaatgatagggcaggatttcgtatgcaagctcttgtttctcaggctgcctgcagaagaagtcgctataaattatctgttgtctacatggtacaaggcccattgactcatctgatgcttgttttgttaatttctttaatatttttatcacggggcagtgggagggcttgggcttttagccacagctgttttaagacttctgatctcctgccctgcaggaataggtgggaagtcattgaatttttacactatagtaatttgcattcccacataagtttgagtgttacgaaaacattcctttaaagggatctgtgctacacaaaatatgccaggacctcacagacaaagccattgctagaaatgtcattccaatgatcagatctggaaacaggctgccataaccacttttccttcttgtagactcagctcacctgtatatttaaactgttcttggcatcttgaaacacctatttctactcaggtactcattgtcctgttactgattcacctttctgatccttttcaaccagttttcccccaaggggggaaattttacttaacctctagtatttgaacaactcaatatttgaattgttgccccatttgcttttacctgtactgtattcttggtcatctcaaatggcgtctaaacccagctactttgcattccagaagtttccattccctccaattccacctaatttttcatctgtcctagttactggctctttcttcatgtcttatttctcttgctttgggagcttaaaagattttacaagacctaattttgggttccttccttggagccatagttaccctgccaagaagagtagaaaatgggttcaactcctgtttcgctccaccaacacctctgtgagtctcatcatcagctgagcgatgatgccttacaggttgcatagcactggaactttcctagagtaacggctctgctgccagggtttctctgggctcattcttccactgacttaattatgatctatgcctaacagagccccagtacaactattttgcagaatggctgttaccctagaattactatagcacatattgagatatagttgtactccctagtagataggaactgaccccaacaataaactttgataataaagamaaaaaaaaaaaaaaaaaaaaaaa

SEQ ID NO: 241 - DNA, 1481 bp, Homo sapiens
ggcacgagcctggcagagagactctgaaatgagggattagaggtgttcaaggagcaagagcttcagcctgaagacaagggagcagtccctgaagacgcttctactgagaggtctgccatggcctctcttggcctccaacttgtgggctacatcctaggccttctggggcttttgggcacactggttgccatgctgctccccagctggaaaacaagttcttatgtcggtgccagcattgtgacagcagttggcttctccaagggcctctggatggaatgtgccacacacagcacaggcatcacccagtgtgacatctatagcacccttctgggcctgcccgctgacatccaggctgcccaggccatgatggtgacatccagtgcaatctcctccctggcctgcattatctctgtggtgggcatgagatgcacagtcttctgccaggaatcccgagccaaagacagagtggcggtagcaggtggagtctttttcatccttggaggcctcctgggattcattcctgttgcctggaatcttcatgggatcctacgggacttctactcaccactggtgcctgacagcatgaaatttgagattggagaggctctttacttgggcattatttcttccctgttctccctgatagctggaatcatcctctgcttttcctgctcatcccagagaaatcgctccaactactacgatgcctaccaagcccaacctcttgccacaaggagctctccaaggcctggtcaacctcccaaagtcaagagtgagttcaattcctacagcctgacagggtatgtgtgaagaaccaggggccagagctggggggtggctgggtctgtgaaaaacagtggacagcaccccgagggccacaggtgagggacactaccactggatcgtgtcagaaggtgctgctgaggatagactgactttggccattggattgagcaaaggcagaaatgggggctagtgtaacagcatgcaggttgaattgccaaggatgctcgccatgccagcctttctgttttcctcaccttgctgctcccctgccctaagtccccaaccctcaacttgaaaccccattcccttaagccaggactcagaggatccctttgccctctggtttacctgggactccatccccaaacccactaatcacatcccactgactgaccctctgtgatcaaagaccctctctctggctgaggttggctcttagctcattgctggggatgggaaggagaagcagtggcttttgtgggcattgctctaacctacttctcaagcttccctccaaagaaactgattggccctggaacctccatcccactcttgttatgactccacagtgtccagactaatttgtgcatgaactgaaataaaaccatcctacggtatccagggaacagaaagcaggatgcaggatgggaggacaggaaggcagcctgggacatttaaaaaaaaaaaaaaaaaaa

SEQ ID NO: 242 - DNA, 652 bp, Homo sapiens
gaattcggcacgagcaacagtggggcactctgctcccaggcaggtcccactgggctgagccgcacagcctggctttgggcttccctgactgcaccacccacatcasctgcctctagcccttaamatacaaaacttcccccagtcactggccgccaggctgagttgggggatgtgttacatccctgggtccactggggggcagtgttggccatggtgttggtgctggctctgccgagaggcgttggagtggctgtgtggggcggtgagcgccggcccagcctgatggaacccactgtaccaggcccaggcctcagcctctgagaaggacttccctgtgtcactcactcatacatgtcctcaggacgtgaagacatttcagcagaccaaagtttccttcgaatttccttcgaatcgtccagatacttggagacatctcctcctcacctgtggggtgctggggcagtcctaggcgtgggggcagatgggtggacagctgctgctgccctgctgggggtgggcagcccttggagcacacagtggtgaagacattcctgaatatgtctcaggctgtagaaatcttattttgtggaaagattttagagaatcatcaaaataaacttttaccaaataaaaaaaaaaaaaaaaaactcga

SEQ ID NO: 243 - DNA, 1711 bp, Homo sapiens
ggcacgagcgctcctgtcctgccactgagggacccggttaccaaccctcatgtagctcagtttgcccatctgtcccggtgctaacacacagttctcgggagactttccccattcccagaggagtagtgcgaaatgcgtgtacctctagtcttaagctgggcgtttgtattagttgggttttctggtgtctatttagcaagtgaaagtttctggttccctccttcactgtgtgacctgactagtcctcctggattgcatttatggaagtttatacgagacctagtttccatggaggaactcactgattccgcgagggagatggggtactggatgatggtcttcagccttaaggctatgtttccagtgtcctctgggtgtttccaagagcggcaagaaacgaataaatctctgacccttctcaggtgcagccagagagacactagcccactgatggacggacagacgtgggcaagggtccgtgtcactaaaccacccaccactgccacagctgcctacaacagacacatcagatgacactccgggcaaataaatgattttcactgaggacttactggttttaataataggtcctggtgtagagaagtccctcaacctattgtgcaacgagttttgagaagcgggtaagctgtatgttttgtggttttgtttcataaattcatctacaggaagaccaatattgactgaatgaagctttcatttaaagagctaaaatatgctttgtgtttttatatgtggatactactttaaacctaacgactattcattgtatcatagcttgtgatgtattctgctcatggcttttaaggtaaattgtgccatgatccactgccattctaattgctttaacaagtcattaccacactactgttacatcttaattatgcatacagacaggtagacttgttttacatatgtgaactaactagttgtcaaagcaaatgcagattgtattctgcaagtaaagtctttttctctctgaaatttctagggatgttctttaagtgaaattcatattaaaactgaagattttagttacaagaactgagtgcagattaagtctttgtgattcaacatagtcaagatacaactgtggatatttcatggaagtatgcaataaaatgtctctacctggaaaaatctatcaagcagcgtcacagtactgaatttgaaaccagaaatactgggtttttatataaatgcttcatagatttgttttatgataaagggcacataactctcctaaacctcacaccacctcttgaataggtataataagtccacatcaatgctgatgccttagctattattaaactcttacagtatgatgtaaagtgaaagtacaatgtaagatcattcctaggccaactttgaccagttttatacagaaacatgtgccaacttttctgtttgcaaggataatatcaaagcaaacaccagaaagttatatctttgatgcattttttcaaaatcatacacataatacacaaaccaaagacaaatgatgaatattacgtcagaaaatataaagtcttcccctttcttcttttgccaagaaagtccaatattttcaccatttttatgcacacaatcaactttatttaagctggaagttaatgtctcattgttttcattgttctaaataaacaccttttcccttgagtattgctctaaaaaaaaaaaaaaaaaaaaa

SEQ ID NO: 244 - DNA, 2058 bp, Homo sapiens
ggcacgagctcaaagagtaagaatccaagtgtgtgacattacatagctttgcatctatggaaacctaaatcataattgtttccactgcccaattatgttccttttcataacatttactattctggctatatttatcatagaacctaggaaccttagagttgacctgaatctaattaaatttcagacctcctggccaaagaccctagtggaagagcaaaactaaatcaacatattaccaatctcaagtatttctctgaggacccagaccactgactttttgttgtcattttcaggttgatcctataactgtatgttctacaatatctgtgctccaccagctcagtgaggaatcaacggaatatcaaaagtaaatattggtcaccatataccttttggtactagtctacgaaataattggctgaggaactgtttcatattaaagaaaagctaaaagcaatgtgtgatcttagattagacctatgattggaatgtatgtatattttatatacaaaatattgaggaaattgacaaaatttaaatacagaatatggattagataataggaatgtatcaaggtcaatatttaaaaagataatttcaacttttattttattcagtgggtacatgtgcagactttgttttacatagtacccaacagtttttcaacgcttatcccccaccctctagtaatctgcagtgtctattattgtcatcttcgtggctattgtacatgggattccatacttgattttgctctcaacatgaacattattggtgtagagaaatgccactaagttttgtacgttgcttttgtatcctgaaactttgctaaagttatttatcatttccaggagcctttcgttggagtctttagggttttctagttagagagtcatcagtgaagagagataatttgacttcttcttttcctttttgggtgccttttacttctttctcttccctgattgctctggctagggtttctaacatcaaattttttgatgttgatcattatactgtagttatgcaggggaatgtctttgttctttctaaagaacattcaatgttaaacattgaaatgtttaacaatgaaagatcattatatgtaatttactctcaaatggtcaagggagaggagagagaaagagacagagagaaagaataagaaaagagagtgagtaaatggggcaaaatgcaaacaatttgtcaatctatgtaaaatgtttacaagagttctgtgttacatttttgcaactcttctgtatgtttaaaataatgttaaaataacaattttcccaaatgtcaaatgttgccacatacaagcatttatgagcatggaaaatgtggcttctgaatgataggatacaaaatctggtgatgagcgaatacactgaatatatcaagattgagttgccatcttagaaggagaatattagctataaatcacatgatgaatacatcaatattaaatagactagaaaaccaataattataaggtcacaagagtgcaataaacatgaattatctccattgcatgtattttcatctctacttgccagttttatgagattcagtccccaatatattttcaattaattcaacatagaagattcacttctagtatgttttcaaattgtttcaaaccctgaccatctttttgattgctctaccttccaaaagaaaagaagggaacactaattttctttcctgatttacttcattgttttcttctgttagattaactttacctataaaagattgtctcttgactttatatatatatatatgtgtgtgtgtgtgtgtgtgtgtgtgtgtgtgtgtgtgtgtgtgtatttgaagaggacatgtgcctccataaaaggaaataaaatgagagaatacattattgattttgtgaaatcaaaatatttgaattatggtttctcaatattcaaaaactcttgcagtttctgtacttatttcttctgatgcatagagtttcggggactacatatgtttcacaaccaaagatatccacttgaaataaaaacattataaagttaaaaaaaaaaaaaaaaa

SEQ ID NO: 245 - DNA, 407 bp, Homo sapiens
gaattcggcacgagctcgtgccgaattcggcacgaggttaacccagggcctagacttctagtgcctctgaggcagaaccaaaggagcctgcactgggggaaatcccttttcctgcctgcctgtctgcctgtgacctgtgtacgtattacaggctttaggaccagctgattgttatgcttgcaggatggttttgaaacagaaacaatacttgtttactgtaggaatcctatttatattatttttcagtcctgtgaatgctgtgaaaagatttattcctttgaggccaggaagctcccaggcatatatgcttctaggttaggattgtcctgactcactaaagatgccaggatattggggctgaggggagtttgaggtgttaaaaaaaaaaaaaaaaaaaaaaactcgag

SEQ ID NO: 246 - DNA, 675 bp, Homo sapiens
ggcacgagctgctcttcttcttcaacatgctcttctgggtgatttccatggtgatggtggctgtgggtgtctacgctcggctaatgaagcatgcagttctccctctgcctcaccgctgtgttcctgctgcagctggccgctgggatcctgggcttcgtcttctcagacaaggctcgagggaaagtgagtgagatcatcaacaatgccattgtgcactaccgagatgacttggatctgcagaacctcattgattttggccagaaaaaggtatgggtcagccagtggtctgggggactgtgggtaaaagtgaatgtcatcccaagagatgcctcaccctctatgcctgtggggctcttcattacctgccaggtaatggcttctgggaaggggtttggcaaaaaaagcacacgtagcagagtgctttaaatgtacttttaaagacacagaacagtatatatagtaatctactgtgttataaatggttacttacagggggtgaggaactgggcagattcttgaatattacctcttcaaaagtgacattttaggctggtccaaagggagtgagttatctcatttgattgttcacagtcagctacagatccaactccttgttctactctttccccccttctcagtgctgcacttgactagactaaaaaaaaaaaaaaaaaa

SEQ ID NO: 247 - DNA, 2398 bp, Homo sapiens
  misc_feature (1874)..(1874): n equals a,t,g, or c
attgcttagtttgatgtgtcttgctttaaatccatttatttcaacaagcttaaagagatttttttttaatggagatgatttaattttaacaatctgtgattttctctgaatcgaacttgtgttttggcacctttcaatctgtggtaacaaatgacaagaagggtgcaattcttccttcccttgtgcagggattttgcctccccctttctcccagatgaaagatatttgggtctctagaataactgtggtacagttagctccagagtgttttctttctggaggcagtttagacaacagcctcaagtagtgcttttgttaaaaatatacatgtttttaaaagtgcttgtatttctaatattcttttctcctttctcttctagtctgttctctggggaggcagtaaggggccgtggagctggcctcggcctcggcatcgggagaggctggacttcctgtctctctgtgctgaatggctgcgatggcgcccgctctcactgacgcagcagctgaagcacaccatatccggttcaaactggctcccccatcctctaccttgtcccctgggcagtgccgaaaataacggcaacgccaacatccttattgctgccaacggaaccaaaagaaaagccattgctgcagaggatcccagcctagatttccgaaataatcctaccaaggaagacttgggaaagctgcaaccactggtggcatcttatctctgctctgatgtaacatctgttccctcaaaggagtctttgaagttgcaaggggtcttcagcaagcagacagtccttaaatctcatcctctcttatctcagtcctatgaactccgagctgagctgttggggagacagccagttttggagttttcyttagaaaatcttagaaccatgaatacgagtggtcagacagctctgccacaagcacctgtaaatgggttggctaagaaattgactaaaagttcaacacattctgatcatgacaattccacttccctcaatgggggaaaacgggctctcacttcatctgctcttcatgggggtgaaatgggaggatctgaatctggggacttgaaggggggtatgmccaattgcactcttccacatagaagccttgatgtagaacacacaattttgtatagcaataatagcactgcaaacaaatcytctgtcaattccatggaacagccggcacttcaaggaagcagtagattatcacctggtacagactccagctctaacttggggggtgtcaaattggagggtaaaaagtctcccctgtcttccattcttttcagtgctttagattctgacacaaggataacagctttactgcggcgacaggctgacaytgagagccgtgcccgcagattacaaaagcgcttacaggttgtgcaagccaagcaggttgagaggcatatacaacatcagctgggtggatttttggagaagactttgagcaaactgccaaacttggaatcsttgagaccacggagccagttgatgctgactcgaaaggctgaagctgccttgagaaaagctgccagtgagaccaccacttcagagggacttagcaactttctgaaaagcaattcaatttcagaagaattggagagatttacagctagtggcatagccaacttgaggtgcagtgaacaggcatttgattcagatgtcactgacagtagttcaggaggggagtctgatattgaagaggaagaactgaccagagctgatcccgagcagcgtcatgtacccctgtgagtagacctcatgcatgatagcattcttgagaaatgttggcacaaggaagaatgaatgaatcgccattatggagagaatgtgttstttgtacataggtgtytagttcygttngttttttccctgatgttgggtagatgagtgcatatacatgctagtgaagaaggggaagatactttgctgtagggttgtattgttgtagtctaaatggtggtaatttccttttgaagtctaagaaaaataactaggagacatcttatgtgtaaaattgtactagtacctctttaagagtgaatttagatttcttttgaaactatatataggacatgataagttaatggcctgattgttgagattttgttgtttccagtaagcagggacaaatgctgagttgacctagttacctttgtaggaaattacagttgcttttgattgaactttcagcagagagcacacccagtcttcaattttaacacttgagattttcttacattttaaggactgacaattagaaaatgcttcagaatatttaatacatcgcctccaagcacagtctagtttcacaacctgactctcttcctattaaaaaaaaaaaaaaaaaactcgrgggggggcccgtacccaatcgcccctcatga

SEQ ID NO: 248 - DNA, 975 bp, Homo sapiens
accctactaaagggaacaaagctggagctccaccgcggtggcggccgctctagaactagtggatcccccgggctgcaggaattcggcacgaggccgacgcctggggtgtggagctgccccaccgccaccccgtgggcgagtggatcaagaagaaaaaacctggcccgagagtcgaagggccgccccaggccaacagaaatcacccggccttacctctgtccccacccttaccttcccccacataccgccccctgcttgggttcccaccccagcgcttgccgctgctcccgctcctgtccccacagcctcctcctcccattctccatcaccagggaatgccccggttcccacagggtcccccagatgcctgttttycctcagaccatactttccagtcggatcaattctattgccattcagatgtcccctcatcagcccatgcaggtttcttcgtcgaagacaattttatggttggtcctcagctgcctatgcccttcttccccacaccccgttatcagcggcctgccccagtggtacataggggttttggcaggtatcgtccccgtggcccctatacgccctggggacagcggcctcgaccttcaaagagaagggccccagccaatcctgagccaaggcctcaatagacggacctaggccttatttcctctttatgaacatggattggacagatctgacacttcctttccattgcttggcctgaacagactgaccttgttaacttaagcctggagtccatgcctcgtcttccttttgttcattgctgttaccaagaaagccaaggaagagcagcctgactcattcttcttggctgcagcctcttccccacttcctgggagtgacccagcgttattcctgcctcctcactcctattctctttgcctttgtgtaaaaataaaatggaaataaacaagttgcacagaaaaaaaaaaaaaaaaaaaaacccaagggggg

SEQ ID NO: 249 - DNA, 1505 bp, Homo sapiens
gcaccatggccacgcccctggaggatgttggcaagcaggtgggtaggtcttgtctgcttcctgtggccctgatgggtccctgcagagcctcacgctgcttgtcgctccttgtcctcttccctccaggtgtggcggggcgccctgctcctggcagactacatcctgttccgacaggacctcttccgaggatgtacagcgctggagctcggggccggcacggggctcactagcatcatcgcagccaccatggcacggaccgtttattgtacaggtaatgaggtgacatctcaggctgcagggaagtagtcaccttcacaaagcatgcactgactgtataaaaaaagaggcagaggcaatggaaattggatgttagctgctgttgattttgccatcctggtcccctggccctctccactctccattttttctcagtgacatcaaaatgacccagcaatacgcactcagcagcagcagcgtcacccagtggctataaggccattgagcttcaggaggtgcctagcgcccctgctggtacctctctccccactcctgagaaagagcaaatatctccaaaaacaggaggaatatacccttttagaagcctttgaaagcaagtttattatttttttcctgggtatagaagccttgcccattctttgtaggaggtttttaaaacagtacataaaaattactcataattttacaatccctagattgaatcaacaatatgcaacttatgggtcacctcccgtgtgccactcatttctagatgtaggaggccctgcggtgaatggagctgactaggcactgccctcagggcgcttacgttgtaagaatctcctccaaatgatagctgaaatcaagctgcagcagcactgtattctgctgaaaatgttgaaaaacatttttaagagcattttcttttttaaatatgtatatatttagggggtacaagtgcgggtttctgatgtgcagctatattgcagtgatgacatccgtctgggcttttagtggaccttccactcaaatagtgracattgtacccaatagggaagctttaatcccccacccctyccaccgtgtcaccttytggaatccccagtgtctgtgtttccactcagtatgtccatgtttacccattgtttagctcccactcataagtgagaacattttaagagcattttctcatgccattaaaaaattattatataggccaggtgcggtggctgacatctgtaatcccagccctttgggaggctgaggcaggcagatcacctgaggtcaggagtttgagaacagccaggccaacatggtgaaaccctgtctgtactaaaaatacaagaattaaccagatgtggtagcggcgggcacctgtaattccagctacttgggaggcttgaacctgggaggcagaggttgcagtgagctgagattgcaccactgcactccagtctgggccacagagtgagactctgtctcaaaaaaaaaaaaaaaaaaaactcgag

SEQ ID NO: 250 - DNA, 868 bp, Homo sapiens
gactgactatagggaaagctggtacgcctgcaggtaccggtccggaattccgggtcgacccacgcgtccgctgaatttaggagactttttacccaggggcaaaaggctcttagggtaatgagatggatggtggcccaggtgcattttccagggcctgggttctccagatcccgtggcttctgttgagtggaggcaactttgctctgtgtgaacctcgcccctgtccctctgccgggcacccctggcaggaagcaggactcccatcctcaccctgacttagactgtcctctgagtcagctcctctccaagacaggagtgggcagccctgggcagtcttctggccccttgctaaagtgagggscaggaagctggggctgccctccagaaagccggggtaggractctgaaaaatacctcctctaaacggaagcagggytctccagttccacttggcgccccctcccacaaggcccttcctccctgaggaccccacccccctaccccttccccagcagcctttggaccctcacctctctccggtgtccgtgggtcctcagcccagggtgagctgcagtcaggcgggatgggacgggcaggccagaggtcagccagctcctagcagagaagagccagccagaccccaaccctgtctcttgtccatgccctttgtgatttcagtcttggtagacttgtatttggagttttgtgcttcaaagtttttgtttttgtttgtttggtttttgttttgagggggtggggggggatacagagcagctgatcaatttgtatttatttattttaacattttactaaataaagccaaataaagcctcaaaaaaaaaaaaaaaaaaaaaaaaagggcggccgc

SEQ ID NO: 251 - DNA, 1502 bp, Homo sapiens
gctgattacctttatgttggtttctcttattatttgtctcttgctagatctgctaaaccaacccagcttgctcagagatctcatattgaagcaacatacaggcaatccacatctttctttccctttgaagtatagtcattggatgggatgagggacagggcctgttgggttcacagggccttgcactgcatgggcacatacttaaaagctcttgtgcatggaatccctgtctgttagccacaggcctctttagctctatacattcaaaataactactgtagtagaaaatagataagcttcagctgagttggcttttgatagtggaaaaaaaacaaaatttgactttttatggccaaaattccttgttgacagctgtgatgttctaatatgatttgggaatatgtcagtctacagaacctgcatcctgtaaaaacacctttggggtagacgataaaagtcatttttaaggcaaatacttaccatgtgactttttattaccaaatgcatcagtagtggagctggtatgttgtttcataggatggaaacattagaagtccagagaaaaataaattttaaaaaaaggtggaaaagttacggcaaacctgagatttcagcataaaatctttagtatgaagtgagagaaagaagagggaggctggttctgttgctcgtatcaataggttatctgtgtccctcatcttggtgttacagtgttatttctgtcagtattatgaatatgtggttgacccatcctgtcaaatgtaccaacattttcgaaagaattcattcaaatctcttatgccaacagaaaagttccttcttgtttaatatctctttacctcagtcctacattttgattctctggaggagattttagcttgtcttaaaaagccaaatttggagtcatcaagcctgctgaacctgatggggcagctttttgaacagctttctggaagtaagaacttcagttgaaaagccctttgatcgcttcagcccgggacatgcccttcagatggcttattctcagtaaagctttatgtagactgtgacactgtatatgtgtgactcgtacaactttgacgtgtttctgaagtggtttaatcgtatttgttattagcttctttgtggaaatgcaatttttatactaaaaacattgcttatttgcaatgcaatatgttataaatttgttgtttatattactggtattagtcttagcctaatgaacctaattatttttctttctgtattctttgcttcctcaaatagcatctgcagcaattggaatgagaaatccagatatgtgtttcaagtagtacattgcctgaatcacaaatcacttgatcacagtattgtatataatccctgatcctatttgtttcattttattgtaaattcccatttgcatcaaaacctaatgatagtgattggtaagtaaaaacaaatggtgtattgcttttcataaaaaaaaaaaaaaaaaaaaaaaaaaaaaaaaaaaactcgag

SEQ ID NO: 252 - DNA, 3308 bp, Homo sapiens
ccacgcgtccggcccagggctgtctgtctccaaagcccaaccataactcacatccccattccagctcctctgggtgagtctgttccccctcagcctcactttccttatcctgtcaaatgaaggatttggaatgacttaagttattcaagcaacaaacacttactgaattgtcttgccacttccagggtgacattatggagttctgtgattctgcaagaggccagaggggacaaggtcaagtgggtgttcacctggcccctcatcttcctcctgtgcgtcaccattcccaactgcagcaagccccgctgggagaagttcttcatggtcaccttcatcaccgccacgctgtggatcgctgtgttctcctacatcatggtgtggctggtgactattatcggatacacacttgggatcccggatgtcatcatgggcattactttcctggcagcaggacaagtgtccagactgcatggccagcctaattgtggcgagacaaggccttggggacatggcagtctccaacaccatagaagcaacgtgtttgacatcctggtaggacttggtgtaccgtggggcctgcagaccatggttgttaattatggatcaacagtgaagatcaacagccgggggctggtctattccgtggtcctgttgctgggctctgtcgctctcaccgtcctcggcatccacctaaacaagtggcgactggaccggaagctgggtgtctacgtgctggttctctacgccatcttcttgtgcttctccataatgatagagtttaacgtctttaccttcgtcaacttgccgatgtgccgggaagacgattagcgctgagtcgcggcccctgggagctgatctggacaccctgtgacactggcgtcctcctctcccctccttcccccaccacaggtctctcctgcataggcagccactgtccgttctttcacacactggaaggaagagccatcgtggtctttgtctggccacagccaagctgctgggcatcctcctcctccttggagttccacccctgcaaggctggatttgggggccattatctgagcagcttcaaagacccctgagctgccaaccacggagatgtgccaagcatctcatctctcctgcacactttagtcagaaggacttctgcatgcagtttgtctttctgttctgcaggcagcttcagaattgaggtcatttgtgagcacaagatctcatagggcaggtgcaaaataggaatgttgttctcaagtgtcacctccagcccagaggtggttccttaggcagcatgtgctcctgggagcctctgacttttgctggaagcacccacagtttggaaggggcaagacctcaacctgttggggtttagggcccatgatggcagacattctaccccttttcctggaaaaactggaagaatgaaaataatttttttctgtggaagagagaaaatgagtgaatattcttctcacttttattgatgcattcagagaataagcaatgaaatattaaaaaatgaaacatcatataggtcatcatacttgaaaattatcattccatatgaaaggatcatgatacacaccaaaaaagtaatgatcgtaaagacacaaatcctctgtatgccatcttgcattggcactgaggtgtttggtttggaatagggaaaaagagacaggatctcgctgtgttccccaggtaggtcttgaactcctggcctcaagtgatcctcctgccttgacctcccaaagtgctggattacaagcgtgagcccctgcacccggcccaagcagttgcttctttttttctctttttttttttttttgagatggagcctcactctgttgcccaggctggagtgcagtggcgcgatctccactcactgcaagctccgcctcccgggttcatgccattctcctgcctcagcctcccgagtagctgggactacaggcgcctgccaccacacccagctaattttttgtatttttggtacagacagggtttcaccgtgttagccaggatggtcttgatctctgatctcggatccgccaccccggcctccaaagtgctggattacaagcgtgagccaccgggccccgccaagcagttgcttcttatgcaacatgttgggtgggacttgtccacgggccaggccaataaaattcttaatcctgcagagaggcagtaccctcatcaccccatcactggaaaacaaatgtttaagctatcaagagagggaatgtgcagcttggttctagatgcatggtttggaggatctacctttggcctaaagggaatgtcccaaacaacagagccttctttgctgtcactccagaattctctacacagaatttcccaagtccattcaggacagacgcgcagtcctctttcaatggaagaagagaggacttttcccctcctgaaaaatgactggagtgtgaacaaggcagctctgtttttctaaataagttgttcttgtgagttttttctggccactgggcatctctgccctcacttttcatccctgccctctaagctgcagaccccatgaccacactgtctgcttccttgagcttcccgcacgaggcttgcacctgggggacctggagaccctgcggacagaactgtggctgagccactgtggccaactcttggggagctccacagtgggggttgctggtctgtgaggctgagtctccatttcagagcacacactccctggcagggcgcctccgcctgtgtctcctgcccagcagccgccagcagggaatagttgctggtgtctgagcacaaagagagctttgattacctagagaggaaaaaggctgtcagccagatgcagccaggcccaggggtagatacaggagttgctaaggaaggggccgagccaggagaggccaggcagatccacaaagcccaaggggatgcaggctgggtgtggtttctgagggaacctaccaaatagcaggtagatggaatcagaggactcttgtgtcctgaaagaacctccttaaaaacaactaaaaccaagaacttctggggctgttcacacattgttcaagtcaccccaagatcgttctggcacgctgagctgaacaccaccatctttgttcattctctctctaatgggcaaagcaggatcatcgagttgaaaagttgtaaataatgaggatatttatcccgctatttattttttcaataactgtgacctcctgcactgtgaatgctctgtgacatgagattcttagtttaataaaactgtcattaaatttgaaaaaaaaaaaaaaaaaaaaaaaaaaaaaaaaaaaaaa

SEQ ID NO: 253 - DNA, 1769 bp, Homo sapiens
agaaaaattgcagggacccaccccagacttgtgagtgcgagtgaagcaggagcagccctggccatcactgtttctttgacgtgtacatcccatcctgagatgcagctgggctgggagccgccacctgggtggatctgattcctggatttccccatcctggggasaggtgacccatcctgttctcctccttaggtccatgtgaaatctgargtccttgctgtcaagttgtcacaagaaataaactacgcaaagagcctctactatgaacagcagcttatgttaagactcagcgaaaaccgagagcagctggagctggactcctgaagccccgctgctgagatgggcgctcccgacacagcgcagacccaccaggaggaaagaggcccagctctcagctgacgatggaggcagaaccggagtcgggtttggggaagttgtcaaggaatgagggaaagtaaatcctcatgaggaaaagtacaaatggaaatcgtattaatttgtgaggcagggagttattttagattatgggaaataatttttaaaggtattggttaaataacgtttaaaaacatgtactgagatgaatctaatttttagattgccctgtattttgttaacatgtatatatgtacaacagtgtgtttgtaaatatataggaacgtttctgaacagggtctgtgctatgtgtaaaggtttgttaactgtaaagtaatataaagttatattggatcttctattgcactaattctagatgtctaattcaggatactgtctatagaaaggcattcttaaaagttaaagaatgttacgtcttagttttggagactaaagtattcccagtaaagtgggttgaggtgagggctgtggtcctgaaagggacgcctttgacatcgtggctgtccagttgggctgtgagctgtggcacccaggactggcgctggcccttcagaaggatctaggagaggggcttgggagcccacttttaatttctcacccccattttacaaagagtgcttagattcttacaaattatgatgtaagttatccatttggctttttcctaactagtcttaccaaacttagggggaaacctgtgctccattaccacatgggtgcaagtcagcattgtaagttttctcaggttattattattagagaggttggaaacattggtaaactctgttgattgagaaggaaaaaaaaagtcccattgaactgttgcaacaaatcagaaatccacataaaagtgctctcctgcctgggcagcaacaaccaagaacaaagccccgggactgttttctttttaataaagccacaggcaggcatcgtagctccacagcccgaggggacacaggatggaaaccccaggatgagaagggagcagggagagttccagaaagggggatgaaataggagtattaaaaagctgcgttggtaagtttttcatggaaccaagatttgacaaaggcatctcttatccttggttttaaattcctgctgggagcaaggcctggtatgagcgccctgggtcttgtttttggtgtttcgcttttctgtaaggattaagcagatagggagaagggaaaaggggcctcactttagaatgaatgagtcaccttgtgatttttaaatttttattttaataaagctaatcaatttctaaaaaaaaaaaaaaaaaaaaaaaaaagggcggccgctctagaggatccctcgaggggcccaagcttaccgtgcatgcgacggtatagctctctcctatagtgagccta

SEQ ID NO: 254 - DNA, 1138 bp, Homo sapiens
ccacgcgtccgggcgcctgtagtcccagctattcaggaggccgaggcaggagaattgcctgaactcaggaggcggagttgcagtgagccgagatcgcgccattgcactccagcctgggtgacagagtgagactctttctcccaaaaaaaaaaaaaaaaaaaaagtcaaatgcagctgggaatgtggttcgtgcctttttgtatattaaccatttgaaacttggttgtaaggtggggttggcaatgtcaggcctggctgcagcagctcatgtctttagagtgtgcctcttccctctctcgtggggctcgagcaagactaccttcatacatgggctctccagttacatagcaactccagtgttaaattccatcttttcttcctggaaaagccgtagaaaggacacctggacatgcctgctgcacaggttgtctgccttccccatcagccgcagaaggaggaactttgctctcttctctcacagctgtgtgtgcataagaagtagttcggatgatgtgggtcccaccatgtattccttctctgttccatgtagagtaaaataaatgggagttctgtttaatgcatcacctcggttcatattgcatttgccaagaaagtgcaattttattgaacattaggattgaattcttaactgagtaatcaatttcagtagtaagttaaaatgccttctattaatggacaactgcaaccgttaatcagagttacagtagattaacagttgtcagcatttatgctaatagcactaataaaccgtgggctcatgatttgcactttataattccatatttctcaaaacagttggtaatactttttgcttgaaggtattgattcttttgtccctttgcttgctacttggagatgtagagaaagctaaatgacattttcacggtgatgacacaatatcaccttctgcttttgcacacttggctttgtgtcaaaatagatggaaagggttcatttgttctggtgctctactgtttaatttgatctggtgtgtgactaaagcaagacaaatagtatttttaatgaaaccatttaataacctctggtagcttagagtcgaaggcattggaaaaatgcaattaaaggatgcctagatgtaaacaaaaaaaaaaaaaaa

SEQ ID NO: 255 - DNA, 6729 bp, Homo sapiens
ccacgcgtccgggagggcaacggggcggcgcgggcggccgggcgcagggtcgcgggaggtgacgcgcggcgaggatggcggcgcggggccgggggctgctgctgctgacgctgtcggtgctgttggcggcgggcccctccgccgctgcggccaagctcaacatccccaaagtgctgctgcccttcacgcgggccacgcgcgttaacttcacgctggaggcctcggagggctgctaccgctggttgtccacccggccggaggtggccagcatcgagccgctgggcctggacgagcagcagtgctcccagaaggcagtggtgcaggcccgcctgacccagcctgcccgcctcaccagcatcatcttcgcagaggacatcaccacaggccaggtcctgcgctgtgatgccattgtggacctcatccatgacatccagatcgtctccaccacccgcgagctctacctggaggactcccccctggagctgaagatccaggccctggactccgaagggaacaccttcagcactctggctggactggtcttcgagtggacgattgtgaaggactccgaggcggacaggttctcagactcccacaatgcgctgcgaatcctcactttcttggagtctacgtacatccctccttcttacatctcagagatggagaaggctgccaagcaaggggacaccatcctggtgtctgggatgaagaccgggagctccaagctcaaggctcgcatccaggaggctgtctacaagaatgtacgccctgcagaagtcaggctgctgattttggaaaacatccttctgaacccggcctatgacgtctacctgatggtgggaacctccattcactacaaggtgcagaagatcaggcaagggaaaattacagaactctccatgccttccgatcagtacgagttgcagcttcagaacagcatcccgggccccgaaggagacccaacccggccggtggctgtcttggcccaggacacgtcgatggtcactgcactgcagctgggacagagcagcctcgtccttggccacaggagtattcgcatgcaaggtgcttctaggttacccaacagcactatctacgtggtcgaacctggatacctagggttcactgttcaccctggtgacaggtgggtgctggagaccggccgcctgtatgaaatcaccatcgaagtttttgacaagttcagcaacaaggtctatgtatctgacaacatccgaattgaaactgtgcttcctgctgagttcttcgaggtgctctcgtcctcccagaatgggtcataccatcgcatcagggcactaaagaggggacagacggccattgacgcggccctcacctctgtggtggaccaggatggaggggtccacatactacaggtgcctgtgtggaaccagcaggaggtggaaattcacatcccgatcaccctgtatcccagcatcttgacatttccgtggcaaccaaagacgggcgcctatcagtacacaataagggcccacggtggcagtgggaacttcagctggtcttcgtcaagccacctggttgccacagttactgtcaagggcgtgatgaccacaggcagtgacatcgggttcagtgtgatccaggcacatgatgtgcagaacccactccatttcggtgagatgaaggtgtatgtgatcgagccccacagcatggagtttgccccgtgccaggtggaggcacgtgtgggccaggccctggagctgcccctgaggatcagtggcctcatgcccggcggggccagtgaggtggtcaccttgagcgactgctcccactttgacttggctgtcgaggtggagaaccagggtgtgttccagccactcccagggaggctgccgccaggctctgagcactgcagcggcgtccgggtaaaggccgaggcccagggctctaccacgcttcttgtgagctacagacacggccacgtccacctgagtgccaagatcaccattgctgcctacctgcccctcaaggctgtggatccctcctctgttgccttggtaaccctgggctcctcaaaggagatgctgtttgaaggaggtcccagaccttggatcctcgagccgtccaaattcttccagaacgtcaccgctgaggacactgacagcatcggcctggctctctttgccccccattcctcccggaattatcagcaacactggatccttgtgacctgtcaggccttgggtgagcaggtcatcgccctgtcggtggggaacaagcccagcctcaccaacccctttcctgcggtggagcctgccgtggtgaagttcgtctgcgccccaccgtccaggctcaccctcgtgcctgtctacaccagcccccagctggacatgtcctgtccgctgctgcagcagaacaagcaggtggtcccagtgtccagccaccgcaaccccctgctggacctggctgcttacgaccaggagggccgccggttcgacaacttcagctctctgagcatccagtgggagtccaccaggccagtgttggccagcatcgagcctgagctgcccatgcagctggtgtcccaggacgatgagagtggccaaaagaagctgcacggtttgcaggccattttggttcacgaggcatcaggaaccacagccatcactgccactgccactggctaccaggagtcccacctcagctctgccagaacaaagcagccgcatgaccctctggtgcctctgtcggcctccatagagctcatcctggtggaggacgtgagggtgagcccagaagaggtgaccatctacaaccaccctggcatccaggcagagctccgcatcagggaaggctcaggttacttcttcctcaacaccagcaccgcagatgttgtcaaggtggcctaccaggaggccaggggtgtcgccatggtgcaccctttgctcccgggctcatccaccatcatgatccatgacttgtgcctcgtcttcccggccccagccaaggctgtcgtttacgtgtcggacattcaggagctgtacatccgtgtggttgacaaggtggagattgggaagacagtgaaggcatacgtccgcgtgctggacttgcacaagaagcccttccttgccaaatacttccccttcatggacctgaagctccgagcagcctccccgatcattacattggtggcccttgatgaagcccttgacaactacaccatcacattcctcatccgcggtgtggccatcggccagaccagtctaactgcaagtgtgaccaataaagctggacagagaatcaactcagccccacaacagattgaagtctttcccccgttcaggctgatgcccaggaaggtgacactgcttatcggggccacgatgcaggtcacctccgagggcggcccccagcctcagtccaacatccttttctccatcagcaatgagagcgttgcgctggtgagcgctgctgggctggtacagggcctcgccatcgggaacggcactgtgtctgggctcgtgcaggcagtggatgcagagaccggcaaggtggtcatcatctctcaggacctcgtgcaggtggaagtgctgctgctaagggccgtgaggatccgcgcccccatcatgcggatgaggacgggcacccagatgcccatctatgtcaccggcatcaccaaccaccagaaccctttctcctttggcaatgccgtgccaggcctgaccttccactggtctgtcaccaagcgggacgtcctggacctccgagggcggcaccacgaggcgtcgatccgactcccgtcacagtacaactttgccatgaacgtgctcggccgggtaaaaggccggaccgggctgagggtggtggtcaaggctgtggaccccacatcggggcagctgtatggcctggccagagaactctcggatgagatccaagtccaggtgtttgagaagctgcagctgctcaaccctgaaatagaagcagaacaaatattaatgtcgcccaactcatatataaagctgcagacaaacagggatggtgcagcctctctgagctaccgcgtcctggatggacccgaaaaggttccagttgtgcatgttgatgagaaaggctttctagcatcagggtctatgatcgggacatccaccatcggagtgattgcacaagagccctttggggccaaccaaaccatcattgttgctgtaaaggtatcccctgtttcctacctgagggtttccatgagccctgtcctgcacacccagaacaaggaggccctggtggccgtgcctttgggaatgaccgtgaccttcactgtccacttccacgacaactctggagatgtcttccatgctcacagttcggtcctcaactttgccactaacagagacgactttgtgcagatcgggaagggccccaccaacaacacctgtgttgtccgcacagtcagcgtgggcctgacactgctccgtgtgtgggacgcagagcacccgggcctctcggacttcatgcccctgcctgtcctacaggccatctccccagagctgtctggggccatggtggtgggggacgtgctctgtctggccactgttctgaccagcctggaaggcctctcaggaacctggagctcctcggccaacagcatcctccacatcgaccccaagacgggtgtggctgtggcccgggccgtgggatccgtgacggtttactatgaggtcgctgggcacctgaggacctacaaggaggtggtggtcagcgtccctcagaggatcatggcccgtcacctccaccccatccagaccagcttccaggaggctacagcctccaaagtgattgttgccgtgggagacagaagctctaacctgagaggcgagtgcacccccacccagagggaagtcatccaggccttgcacccagagaccctcatcagctgccagtcccagttcaagccggccgtctttgatttcccatctcaagatgtgttcaccgtggagccacagtttgacactgctctcggccagtacttctgctcaatcacaatgcacaggctgacggacaagcagcggaagcacctgagcatgaagaagacagctctggtggtcagtgcctccctctccagcagccacttctccacagagcaggtgggggccgaggtgcccttcagcccaggtctcttcgccgaccaggctgaaatccttttgagcaaccactacaccagttccgagatcagggtctttggtgccccggaggttctggagaacttggaggtgaaatccgggtccccggccgtgctggcattcgcaaaggagaagtcttttgggtggcccagcttcatcacatacacggtcggcgtcttggaccccgcggctggcagccaagggcctctgtccactaccctgaccttctccagccccgtgaccaaccaagccattgccatcccagtgacagtggcttttgtggtggatcgccgtgggcccggtccttatggagccagcctcttccagcacttcctggattcctaccaggtcatgttcttcacgctcttcgccctgttggctgggacagcggtcatgatcatagcctaccacactgtctgcacgccccgggatcttgctgtgcctgcagccctcacgcctcgagccagccctggacacagcccccactatttcgctgcctcatcacccacatctcccaatgcattgcctcctgctcgcaaagccagccctccctcagggctgtggagcccagcctatgcctcccactaggccgcgtgaaggttcccggaggatgggtctcagccgagcctcgtgcacccccaagatggaacatccctgctgcattcacactggaacaagcccctccagatgagtgccccggccccaggccagcttcactgccgtctcttcacacagagctgtagtttcggctctgcccattagctcattttatgtaggagttttaaatgtgtgtttttttcctttcaagtcttacaaagctaagactttttggctcattcctttttgcatggttgtctagggtttctggacaatgtgctgttgcatttttattttcctagccttgctaaaatctttcccttctcaagactttgagcagttagaagtgctctttagaagttgtctgtgggtgatgttactgtagtggtctcagggaaaggattgtccagttactttagggggtttttggtggggtttttccccctgtgaaaacttactttgcccctagtctggctgctgctaggacttctgaggagcaatgggacatgagtgtccctgtatctgcgccactgccgcaagggaagcctcaggaaccagcacctggaggccagggctgctgcccaaccatgggccactgtgaacagacttcagtcctctgtttttgtttcataagccgttgagacatctgatggacttggcttaggccctgctgggacatcccacgtgtgatccctttcactccatcaggacaccaggactgtccttaggaaaatgtccttgagatggcagcaggagtcatattttctgtgtgtgtgtttcggaaagccgctgtgtcctgcctcagcacaaagacccagtgtcatttgctcctcctgttcctgtgccactccagaacctcagcagatctgagccaccgcctgccagtgtgagaggcggccactttcatggcagctcatcaggcgcagggccccagacagcttcccagcaggccctagagcccggcctgggccaatgatggagg

SEQ ID NO: 256 - DNA, 1677 bp, Homo sapiens
  misc_feature (537)..(537): n equals a,t,g, or c
ccccccgggtcgacccacgcgtccggactttttttattttagctattccagggggtttgaagtagtactgcattgtgattttaatttgcatttccctgatgattaatagtgataagcatattttcatataatatttaccatttatttatcttcttgtttgaaatatctgttcaagtcttatgcccattttaatgggacagtttttctgtttattattgattcatattattgacttatagtaatattttatgaattgatctctttattattatgaaatgyttctttttatttgtggtaatactcatcatcatgaaatctaatttgtctgatattattatagccacttatacttactgtatacctgattattttttccatacctttatcttcaatttatctgtatatttgaattcaaagttcatctcttgagcctgaaagtaataagcaccttgaacccggatctttatatctaaatatgattctccagtaaaatttatcagggttctctggacaagtggctgattgattgtagagcanggataagaagagtatatgctgaacctgaatcatttttgtggtgccaaaagtaaggaagtacacaaaaaaattgagaagatatcawgaaatgcacaaaaactaacctgaagtgactctyaatgaccatatctkggacaatttgagtaaaaaaataagtaacaataatggatgatatcttataagataatataaaacaaatatcaatgagtctatgatgatatagaattagaatgtataaatgggaggaaggggaaaattctttgcttaagcagaataataattaattaatataaaaagaataatggaaatggtagaaatagaaagtcaacatttggcaagcaccacagtaataattgttgcaggcaagaatcatcaatggatgctaaagtttgtgagaaaaagtttgatgagaaatgggctatttacataacctcaaaggcttttcccacaagatactgttaattacaaaggggaaaatattgagaaacatggaagacagcaccttaaccaaatgattgaagttaataccattagtaatgcaacaaatcagtatcgtgtgcctcctgatatgatgcactgagaagggcacaagcatcacctttatggtattcttgcaaaaaatgcataatctaaattcaaccatgaagaaatattagaaggatgttctatgactagtcagtactgctcaaaaatgtcaagattatgaaagacaaagaaagactaaggtactttccagatttaaagaaattaaatagacaggactactaaatgcaatatatgagtctgaattggaccctggactaaaattaggcagacagttggtgaattttgagtcaagtctgtagagtagttaatagtatttctggttttgatcatcataatatggttatttaagatgttaacatttggtggatctgggtgaaaagtatatgaggattctctcgcagtatttttgcaatttttttaaatctgaaattcttttaaaatgagaagttggctgggcacagtggctcacacctgtaatcccagcactttgaaacaccaaggcaggagactcgcttgagcccaggagtttgagaccatcctgcgtaagatggcaagactccatctctttaaaaaaaaaaaaaaaagggcggccgc

SEQ ID NO: 257 - DNA, 1699 bp, Homo sapiens
acgcgtccgcgccaagggagcaggacggagccatggaccccgccaggaaagcaggtgcccaggccatgatctggactgcaggctggctgctgctgctgctgcttcgcggaggagcgcaggccctggagtgctacagctgcgtgcagaaagcagatgacggatgctccccgaacaagatgaagacagtgaagtgcgcgccgggcgtggacgtctgcaccgaggccgtgggggcggtggagaccatccacggacaattctcgctggcagtgcggggttgcggttcgggactccccggcaagaatgaccgcggcctggatcttcacgggcttctggcgttcatccagctgcagcaatgcgctcaggatcgctgcaacgccaagctcaacctcacctcgcgggcgctcgacccggcaggtaatgagagtgcatacccgcccaacggcgtggagtgctacagctgtgtgggcctgagccgggaggcgtgccagggtacatcgccgccggtcgtgagctgctacaacgccagcgatcatgtctacaagggctgcttcgacggcaacgtcaccttgacggcagctaatgtgactgtgtccttgcctgtccggggctgtgtccaggatgaattctgcactcgggatggagtaacaggcccagggttcacgctcagtggctcctgttgccaggggtcccgctgtaactctgacctccgcaacaagacctacttctcccctcgaatcccaccccttgtccggctgccccctccagagcccacgactgtggcctcaaccacatctgtcaccacttctacctcggccccagtgagacccacatccaccaccaaacccatgccagcgccaaccagtcagactccgagacagggagtagaacacgaggcctcccgggatgaggagcccaggttgactggaggcgccgctggccaccaggaccgcagcaattcagggcagtatcctgcaaaaggggggccccagcagccccataataaaggctgtgtggctcccacagctggattggcagcccttctgttggccgtggctgctggtgtcctactgtgagcttctccacctggaaatttccctctcacctacttctctggccctgggtacccctcttctcatcacttcctgttcccaccactggactgggctggcccagcccctgtttttccaacattccccagtatccccagcttctgctgcgctggtttgcggctttgggaaataaaataccgttgtatatattctgccaggggtgttctagctttttgaggacagctcctgtatccttctcatccttgtctctccgcttgtcctcttgtgatgttaggacagagtgagagaagtcagctgtcacggggaaggtgagagagaggatgctaagcttcctactcactttctcctagccagcctggactttggagcgtggggtgggtgggacaatggctccccactctaagcactgcctcccctactccccgcatctttggggaatcggttccccatatgtcttccttactagactgtgagctcctcgagggcagggaccgtgccttatgtctgtgtgtgatcagtttctggcacataaatgcctcaataaagatttaattactttgtaaaaaaaaaaaaaaaaaaaaaaaaaaaaaaaaaaaaaaaaaaaaaaaaaaaaaaaaaaaaaaaaaaaa

SEQ ID NO: 258 - DNA, 637 bp, Homo sapiens
gattttcctgcttgcatcatttctagcacagagctggaggaaatggcgaggtgcaggtggccgctggccmtgctgttctacatgggagcaagacagctgctaggtgaaggggaatgaccaggcagccacagggaggacatgtggcctcaggaagcctgggtgtgtatcctggttctgctaggaacacgtgtggggctttgtgtgggtgactctctggctccccaagcctccctttcctactgttatatccttaaagtgcctctgaggccaaagcctttgtggcaattgtcaaatgagtccatatgcagtgagtaccgtgttgagggaggacaaggtcaccaagagctgagaatgtttctccgactgatgagacctagatattgggtacatggaggtccccggtccctttgtgattcctgcagcctgttgcctccttgcctggaccccgcctcagctcagaaagccaattccctagattccaaaggccttcccagaccaattagcatgtcctgcagctgtcagctccctgtgcctagcctggacctcagctcatgtctagcacccagtctcccaaccccacacatattcacaaataaaagaaaataacaaatgaaaaaaaaaaaaaaaaaaaaaaaat

SEQ ID NO: 259 - DNA, 1752 bp, Homo sapiens
  misc_feature (356)..(356): n equals a,t,g, or c
gtcggcggcggcggcggcggttgaactgactcggagcgaggagacccgagcgagcagacgcggccctggcgcccgccctgcgcactcaccatggcgatgcatttcatcttctcagatacagcggtgcttctgtttgatttctggagtgtccacagtcctgctggcatggccctttcggtgttggtgctcctgcttctggctgtactgtatgaaggcatcaaggttggcaaagcaagctgctcaaccaggtactggtgaacctgccaacctccatcagccagcagaccatcgcagagacagacggggactctgcaggctcagattcattccctgttggcagaacccaccacaggtgntatttgtgtcactttggccagtctctaatccatgtcatccaggtggtcatcggctacttcatcatgctggccgtaatgtcctacaacacctggattttccttggtgtggtcttgggctctgctgtgggctactacctagcttacccacttctcagcacagcttagctggtgaggaacgtgcaggcactgaggctggagggacatggagccccctcttccagacactatacttccaactgccctttcttctgatggctattcctccaccttattcccagcccctggaaactttgagctgaagccagcacttgctccctggagttcggaagccattgcagcaaccttccttctcagccagcctacatagggcccaggcatggtcttgtgtcttaagacagctgctgtgaccaaagggagaatggagataacaggggtggcagggttactgagcccatgacaatgcttctctgtgactcaaaccaggaatttccaaagatttcaagccagggagaagggttcttggtgatgcagggcatggaacctggacaccctcagctctcctgctttgtgccttatctacaggagcatcgcccattggacttcctgacctcttctgtctttgagggacagagaccaagctagatcctttttctcacctttctgcctttggaacacatgaagatcatctcgtctatggatcatgttgacaaactaagttttttttatttttcccattgaactcctagttggcaattttgcacattcatacaaaaaaatttttaatgaaatgatttcattgattcatgatggatggcagaaactgctgagacctatttccctttcttggggagagaataagtgacagctgattaaaggcagagacacaggactgctttcaggctcctggtttattctctgatagactgagctccttccaccagaaggcactgcctgcaggaagaagawgatctgatggccgtgggtgtctgggaagctcttcgtggcctcaatgccctcctttatcctcatctttcttctatgcagaacaaaaagctgcatctaataatgttcaatacttaatattctctatttattacttactgcttactcgtaatgatctagtggggaaacatgattcattcacttaaaatactgattaagccatggcaggtactgactgaagatgcaatccaaccaaagccattacattttttgagttagatgggactstctggatagttgaacctcttcactttataaaaaaggaaagagagaaaatcactgctgtatactaaatacctcacagattagatgaaaagatggttgtaagctttgggaattaaaaacaaacaaatacattttagtaaatatatatttttaaataaaaaaaagaaaa

SEQ ID NO: 260 - DNA, 1669 bp, Homo sapiens
ccacgcgtccggcacggtcgccaggcaccgctgaccgaggcctgctgggattccagaattggagagggaggcaccatgaagactctcctgctgctggtggggctgctgctgacctgggagaatggacgggttctgggagaccagatggtctcagacactgagctccaggaaatgtccaccgaggggagtaagtacattaatcgggaaattaaaaatgctctcaagggggtgaagcagataaagacactaatagaacaaacaaacgaggagcgcaaatccctgctcaccaacttggaagaagccaagaagaagaaagaggatgccctgaatgacaccaaggattcagaaatgaagctgaaggcgtcgcagggggtgtgcaatgacaccatgatggccctctgggaggagtgtaagccctgcctgaaacagacctgtatgaagttctacgcccgagtctgcagaagcagcacagggctggttggccaccaggttgaggagttcctgaaccagagttctcccttctacttctggattaatggcgaccgcatcgactccctgctggagaacgaccggcagcagacccacgccctggatgtcatgcaggacagtttcgaccgggcatccagcatcatggatgagctgttccaggacagattcttcacccgtgaggcccaggaccctttccacttctcacccttcagctcattccagcggaggccttttttcttcaatatcaagcaccgctttgcccggaacataatgcctttccctggctaccagcccttgaatttccacgacatgtttcagcccttcttcgacatgatacaccaggctcagcaggccatggatgttaacctgcacagactcccccactttccaatggaattcacagaagaagacaaccaggacggcgccgtgtgcaaggagatccgtcacaactccacagggtgcctgaagatgaaggaccagtgtgaaaagtgccgggagatcttgtctgtggactgttcgtccaacaaccccgctcaggtccagctgcgacaggaacttaataattccctccagattgcagagaagttcaccaagcttgtacgacgagctgctgcagtcctaccaggagaagatgttcaacacgtcctccctgctgaagcagctggacgagcagtttagctgggtgtcccagctggcgaatctcactcagactgaggacccgttctatctccaggtcacgacggtgagttcccagacttctgactccagtgctccctctggcgtcactaaggtggttgtgaagctctttgattccgaccccatcaccgtgatcctcccagaagacctctccaggaacaatcctaaatttatggagaccgtggcagagaaagcccttcaggaataccgccagaagagccgggaggagtgagatgggaacactgcctctccacatggcaggtgtctgagttctgtcgcccccgcgatgagcgataggcccctagagagagctctgcatgtcaccgagtgaccgggccttccttgaggccctcctgtcccctcaccccgcctgtcctccctctggactctgcattgtaacaccgtgttcactgatcatgggaagaactcctgtgtgccactaactcaataaaaccaccagtaatctgaaaaaaaaaaaaaaaaa

SEQ ID NO: 261 - DNA, 795 bp, Homo sapiens
  misc_feature (1)..(1): n equals a,t,g, or c
ngaactagtatattcaccgtctatgaggccgcctcacaggaaggctgggtgttcctcatgtacagagcaattgacagctttccccgttggcgttcctacttctatttcatcactctcattttcttcctcgcctggcttgtgaagaacgtgtttattgctgttatcattgaaacatttgcagaaatcagagtacagtttcaacaaatgtggggatcgagaagcagcactacctcaacagccaccacccagatgtttcatgaagatgctgctggaggttggcagctggtagctgtggatgtcaacaagccccagggacgcgccccagcctgcctccaggtgcagtacaatgacatttttaaaaatcgcccagcaaaggtctttgaattttatttcatccaagaaaatccacagctctttaagctctagatttgtccaaatttaaaatcctgaagttagagatggtatttcactccttcctctattcccaggacctagctttttttttttaacatacacaatagggatttgataagtttctgatggctgcaggcatgtaagagcatttcagtggtattgaatcaatgaagaattttgttgacatgtgaaatcttataaaaatattctttaccgaaggactgagttatgtggcagtgggtacattcattgtttcatccctcccctagtaactgggataaatatgttgatacatagtctctctgtttttctgcatttggaagctttcagaggaacataatgtagaggtgtttctttagcaaagtgcactgatagcaaaca

SEQ ID NO: 262 - DNA, 2709 bp, Homo sapiens
ggcacgagatttcctacaggtgaaacgccatcattaggattcactgtaacgttagtgctattaaactcactagcatttttattaatggccgttatctacactaagctatactgcaacttggaaaaagaggacctctcagaaaactcacaatctagcatgattaagcatgtcgcttggctaatcttcaccaattgcatctttttctgccctgtggcgtttttttcatttgcaccattgatcactgcaatctctatcagccccgaaataatgaagtctgttactctgatattttttccatgcctgcttgcctgaatccagtcctgtatgttttcttcaacccaaagtttaaagaagactggaagttactgaagcgacgtgttaccaagaaaagtggatcagtttcagtttccatcagtagccaaggtggttgtctggaacaggatttctactacgactgtggcatgtactcacatttgcagggcaacctgactgtttgcgactgctgcgaatcgtttcttttaacaaagccagtatcatgcaaacacttgataaaatcacacagctgtcctgcattggcagtggcttcttgccaaagacctgagggctactggtccgactgtggcacacattcggcccactctgattatgcagatgaagaagattcctttgtctcagacagttctgaccaggtgcaggcctgtggacgagcctgcttctaccagagtagaggattccctttggtgcgctatgcttacaatctaccaagagttaaagactgaactactgtgtgtgtaaccgtttcccccgtcaaccaaaatcagtgtttatagagtgaaccctattctcatctttcatctgggaagcacttctgtaatcactgcctggtgtcacttagaagaaggagaggtggcagtttatttctcaaaccagtcattttcaaagaacaggtgcctaaattataaattggtgaaaaatgcaatgtccaagcaatgtatgatctgtttgaaacaaatatatgacttgaaaaggatcttaggtgtagtagagcaatataatgttagttttttctgatccataagaagcaaatttatacctatttgtgtattaagcacaagataaagaacagctgttaatattttttaaaaattctatttttaaaatgtgattttctataactgaagaaaaatatcttgctaattttacctaatgtttcatcctttaatctcaggacaacttactgcagggccaaaaaagggactgtcccagctagacctgtgagagtatacataggcattactttattatgttttcacttgccatccttgacataagagaactataaattttgtttaagcaatttataaatctaaaacctgaagatgtttttaaaacaatattaacagctgttaggttaaaaaaatagctggacatttgttttcagtcattatacattgctttggtccaatcagtaattttttcttaagtgttttgtgattacactactagaaaaaaagtaaaaggctaattgctgtgtgggtttagtcgatttggctaaactactaactaatgtgggggtttaatagtatctgagggatttggtggcttcatgtaatgttctcattaatgaatacttcctaatatcgttggctctactaatattttccaatttgctgggatgtcacctagcaatagcttggattatatagaaagtaaactgtggtcaatacttgcatttaattagacgaaacggggagtaattatgacacgaagtacttaatgtttatttcttagtgagctggattatcttgaacctgtgctattaaatggaaatttccatacatcttccccatactattttttataaaagagcctattcaatagctcagaggttgaactctggttaaacaagataatatgttattaataaaaatagaagaagaaagaataaagcttagtcctgtgtcttttaaaaattaaaaattttacttgattccccatctatgggctttagacctattactgggtggagtcttaaagttataattgttcaatatgttttttgaacagtgtgctaaatcaatagcaaacccactgccatattagttattctgaatatactaaaaaaatccagctagattgcagtttaataattaaactgtacatactgtgcatataatgaatttttatcttatgtaaattatttttagaacacaagttgggaaatgtggcttctgttcatttcgtttaattaaagctacctcctaaactatagtggctgccagtagcagactgttaaattgtggtttatatactttttgcattgtaaatagtctttgttgtacattgtcagtgtaataaaaacagaatctttgtatatcaaaatcatgtagtttgtataaaatgtgggaaggatttatttacagtgtgttgtaattttgtaaggccaactatttacaagttttaaaaattgctatcatgtatatttacacatctgataaatattaaatcataacttggtaagaaactcctaattaaaaggttttttccaaaattcaggttattgaaaacttttcattttattcatttaaaaactagaataacagatatataaaagtgttaatctttgtgctatatggtatgaaatacaatattgtactcagtgttttgaattattaaagtttctagaaagcaaaaaaaaaaaaaaaaaaa

SEQ ID NO: 263 - DNA, 1380 bp, Homo sapiens
cagacccgcggggcaaacggactggggccaagagccgggagcgcgggcgcaaaggcaccagggcccgcccagggcgccgcgcacacggccttgggggttctgcgggccttcgggtgcgcgtctcgcctctagccatggggtccgcagcgttggagatcctgggcctggtgctgtgcctggtgggctgggggggtctgatcctggcgtgcgggctgcccatgtggcaggtgaccgccttcctggaccacaacatcgtgacggcgcagaccacctggaaggggctgtggatgtcgtgcgtggtgcagagcacgggcacatgcagtgcaaagtgtacgactcggtgctggctctgagcaccgaggtgcaggcggcgcgggcgctcaccgtgagcgccgtgctgctggcgttcgttgcgctcttcgtgaccctggcgggcgcgcagtgcaccacctgcgtggccccgggcccggccaaggcgcgtgtggccctcacgggaggcgtgctctacctgttttgcgggctgctggcgctcgtgccactctgctggttcgccaacattgtcgtccgcgagttttacgacccgtctgtgcccgtgtcgcagaagtacgagctgggcgcacgctgtacatcggctgggcggccaccgcgctgctcatggtaggcggctgcctcttgtgctgcggcgcctgggtctgcaccggccgtcccgacctcagcttccccgtgaagtactcagcgccgcggcggcccacggccaccggcgactacgacaagaagaactacgtctgagggcgctgggcacggccgggcccctcctgccagccacgcctgcgaggcgttggataagcctggggagccccgcatggaccgcggcttccgccgggtagcgcggcgcgcaggctcctcggaacgtccggctctgcgccccgacgcggctcctggatccgctcctgcctgcgcccgcagctgaccttctcctgccactagcccggccctgcccttaacagacggaatgaagtttccttttctgtgcgcggcgctgtttccataggcagagcgggtgtcagactgaggatttcgcttcccctccaagacgctgggggtcttggctgctgccttacttcccagaggctcctgctgacttcggaggggcggatgcagagcccagggcccccaccggaagatgtgtacacctggtctttactccatcggcagggcccgagcccagggaccagtgacttggcctggacctcccggtctcactccagcatctccccaggcaaggcttgtgggcaccggagcttgagagagggcgggagtgggaaggctaagaatctgcttagtaaatggtttgaactctcaaaaaaaaaaaaaaaaaaa

SEQ ID NO: 264 - DNA, 813 bp, Homo sapiens
ggcacgagatcattttctgtcccctcctatcttaggctgaccggttccctgatgtgttacctgcttctgctactgatccaaactgcagaacttctcattcatccccaaggcctccaggcagtatccaatggggaatcagctctaaaaggaaccagaccaacgttttccagccccttcattctggtgactgaggggaggaaagaatgggagggggtattcttgtctagtggatggaaaggaaacacactgtcaaattactatatctccttggttttctattacagtagaattctccagccatatttttattgtctatgggggaagttggagatggtgaccttgattagaagtgtctggagggggataaatggaggggataagatttcagttggttttggaaaatgttaaagtcttaaaataatgcgtcccatctgaagaattttttctaaaaccagagtttataaaaatatcactgatacagcctgccccctcatttccctgccacaggagatgtcttggactagagacacttgtttaataatagcttgtctctgatattcccagtagcttccctctgtgtgaggaaaggatagaaatgttcaggacatcatcatacaggctcctcatctacaaagttccagtagcagtgacgcctacacggaagacttggaactgcaaacaggctggggtcacctcagtgacatctgacgctgtccaaccagaagttcgatttttgttctgggggtgaaggaggaaacagactgtactaaaggactaaaataatttgtctatactaaaaaaaaaaaaaaaaaa

SEQ ID NO: 265 - DNA, 2288 bp, Homo sapiens
ccacgcgtccgggggctgcaaggacctgagctcagcttccgccccagccagggaagcggcaggggaaagcaccggctccaggccagcgtgggccgctctctcgctcggtgcccgccgccatgtgggccgtcctgaggttagccctgcggccgtgtgcccgcgcctctcccgccgggccgcgcgcctatcacggggactcggtggcctcgctgggcacccagccggacttgggctctgccctctaccaggagaactacaagcagatgaaagcactagtaaatcagctccatgaacgagtggagcatataaaactaggaggtggtgagaaagcccgagcacttcacatatcaagaggaaaactattgcccagagaaagaattgacaatctcatagacccagggtctccatttctggaattatcccagtttgcaggttaccagttatatgacaatgaggaggtgccaggaggtggcattattacaggcattggaagagtatcaggagtagaatgcatgattattgccaatgatgccaccgtcaaaggaggtgcctactacccagtgactgtgaaaaaacaattacgggcccaagaaattgccatgcaaacaggctcccctgcatctacttagttgattcgggaggagcatacttacctcgacaagcagatgtgtttccagatcgagaccactttggccgtacattctataatcaggcaattatgtcttctaaaaatattgcacagatcgcagtggtcatgggctcctgcaccgcaggaggagcctatgtgcctgccatggctgatgaaaacatcattgtacgcaagcagggtaccattttcttggcaggaccccccttggttaaagcggcaactggggaagaagtatctgctgaggatcttggaggtgctgatcttcattgcagaaagtctggagtaagtgaccactgggctttggatgatcatcatgcccttcacttaactaggaaggttgtgaggaatctaaattatcagaagaaattggatgtcaccattgaaccttctgaagagcctttatttcctgctgatgaattgtatggaatagttggtgctaaccttaagaggagctttgatgtccgagaggtcattgctagaatcgtggatggaagcagattcactgagttcaaagccttttatggagacacattagttacaggatttgctcgaatatttgggtacccagtaggtatcgttggaaacaacggagttctcttttctgaatctgcaaaaaagggtactcactttgtccagttatgctgccaaagaaatattcctctgctgttccttcaaaacattactggatttatggttggtagagagtatgaagctgaaggaattgccaaggatggtgccaagatggtggccgctgtggcctgtgcccaagtgcctaagataaccctcatcattgggggctcctatggagccggaaactatgggatgtgtggcagagcgtatagcccaagatttctctacatttggccaaatgctcgtatctcagtgatgggaggagagcaggcagccaatgtgttggccacgataacaaaggaccaaagagcccgggaaggaaagcagttctccagtgctgatgaagcggctttaaaagagcccatcattaagaagtttgaagaggaaggaaacccttactattccagcgcaagggtatgggatgatgggatcattgatccagcagacaccagactggtcttgggtctcagttttagtgcagccctcaacgcaccaatagagaagactgacttcggtatcttcaggatgtaactggaataaaggatgttttctgttggacatgtactgaaaattaacacatgtagtagccttaaaattttagacttctcgaacatgaggctgttacagtaatttttttaacactgtgcattgtacttttctaccttaaaaaaatcagtgaggatatttatttaatgaacatcaattccttttaaattttcttagagaaatttctctgtggctcagttttaccacccataaagcggagacagtaatttatggtatcctttctgacccacaaagtatgaaaagttctgtaatctgtaaactcagttctgtaatctgtattattgagatgattaatataaagttgtattttcactgaaaaaaaaaaaaaaaaaaaaaaaaaaaaaaaaaaaaaaaaaaaaaaaaaaaaaaaaaaaaaaaaaaaaaaaaaaaaaaaaaaaaaaaaaaaaaaaaaaaaaaaaaaaaaaaaaaaaaaaaaaaaaaa

SEQ ID NO: 266 - DNA, 3758 bp, Homo sapiens
ccacgcgtccgctttttctcaggatgaatattttcctggccgactcattgatccttggtacaaataaacttctggaagacccagagagaggaaaacacaggagaaattgagcgatgtacgtacatcaaataccactactcctcagcaaccatccccaggaacctcactttcaatatcacgaagaccatccgtcaggatgagtggcatgccctacacctgcgcagaatgacggctggcttcatgggcatggcggtggccatcatcctctttggctggatcatcggcgtgctgggctgctgctgggaccgaggccttatgcagtacgtggcaggctgctcttcctcatgggagggaaaacagtggaattaaagagtgtctgccccagcccggcagggtgaagtaggatggggaaaacgttctcaccagaccctgggacttctatgctgcagcatcgtgacctgaggggtggatgcagttgccacagctctttgaggcaaaggccccgatgctctgtggacagcctcaggcttgggatggatttggcagtgaggaacttattgtaacagaagaaagtcatccaagatgcctgaggaaagaaaccttcaattgagccagccggctggaaaatgtggccaagaaaaccgcagagaccaatgttcggaggagaaaaccagaaagaggggcctgcctggcccctttgatcctttatggccgattccgtggacattgctgctcctcacgccggcagccctctcttgagtacctcaattgcagtctccagaccctcaccccgcaggcattcctgggtcggtgtcccagtcggtcacagtcatggatcctctgcagagcagtagaaagtcgggaggggcccgtgcccatggtcaggaaaggagcggcaggaggaaagaggagcatgagaactcagaagaaattgtacctactcagaaggtggagtgaggatagacgttcccagattcaaaggcatcatgaagtgtcatgacaagatagaaaagactttgggctggccaagaaggaactggataaaattatgagtgaggtacagcaggtgggaacagtgtcactgaaccctatcaacagcagagcatgagaacgtgaattcctgctgctggggaggcaatgaaatgatatgggccttcagatgtctatgaatcctgacccaccgtgggtgccagttttcaagagggcttcccatcaaatattgtgcgcaaaggatggatggatgaaaggaagagtgagccaataaacgagggaacgccgggaaaggcagcctcaagccggtgggccctggcacccccaccgtccctgagcatcgagccggttcccgccccggcccgaactggcccgcgcgcgctcgcagccccgcggcggaacccgagggcggcggcagcggttccttgaacgagccggggaatctggagggagcacacaggaaaggcagagccgcgagctggaccagcggcaaatctctagaagatgacgggttctttaaaacgcttcgaaatcactggaagaaaactacagctgggctctgcctgctgacctggggaggccattggctctatggaaaacactgtgataacctcctaaggagagcagcctgtcaagaagctcaggtgtttggcaatcaactcattcctcccaatgcacaagtgaagaaggccactgttttctcaatcctgcagcttgcaaaggaaaagccaggactctatttgaaaaaaatgctgcccgattttacatttatctggcatggatgtgactattgtaagacagattatgagggacaagccaagaaactcctggaactgatggaaaacacggatgtgatcattgttgcaggaggagatgggacactgcaggaggttgttactggtgttcttcgacgaacagatgaggctaccttcagtaagattcccattggatttatcccactgggagagaccagtagtttgagtcataccctctttgccgaaagtggaaacaaagtccaacatattactgatgccacacttgccattgtgaaaggagagacagttccacttgatgtcttgcagatcaagggtgaaaaggaacagcctgtatttgcaatgaccggccttcgatggggatctttcagagatgctggcgtcaaagttagcaagtactggtatcttgggcctctaaaaatcaaagcagcccactttttcagcactcttaaggagtggcctcagactcatcaagcctctatctcatacacgggacctacagagagacctcccaatgaaccagaggagacccctgtacaaaggccttctttgtacaggagaatattacgaaggcttgcgtcctactgggcacaaccacaggatgccctttcccaagaggtgagcccggaggtctggaaagatgtgcagctgtccaccattgaactgtccatcacaacacggaataatcagcttgacccgacaagcaaagaagattttctgaatatctgcattgaacctgacaccatcagcaaaggagactttataactataggaagtcgaaaggtgagaaaccccaagctgcacgtggagggcacggagtgtctccaagccagccagtgcactttgcttatcccggagggagcagggggctcttttagcattgacagtgaggagtatgaagcgatgcctgtggaggtgaaactgctccccaggaagctgcagttcttctgtgatcctaggaagagagaacagatgctcacaagccccacccagtgagcagcagaagacaagcactctgagaccacactttaggccaccggtgggaccaaaagggaacaggtgcctcagccatcccaacagtgtcgtcagagggtccccagggcattttcatggcaagtacccctctgcccccactccagcagtgcttcccaaagtgtgctctgtcacctgctttgcaatcggcttccattagcgcatgttttattttggtgtgacggttggccctcctaaacacggactttcctcaggctggttcaagacggaaaaggactttcttctgttttcttccaaagtgcaaccacagtggagagcccacggtgggcttagcctgcctaggcccttccatttctcttctttgaccgtgctaggaattccaggaaagtgcattcctgccctggtgaccttttcctatgtctaggctcctccacaggtgctgctattttgtgagctccggctcctgtttagcttttatttcagttctaacctcagtccagaaacatatgtgaggttgtttccctcttcagccacggctacaataccggaaaatgctagtttttatttatttttttaagtagtgcttcctaaatggtttgcatgagagccacctggggtacatgttgaaaacttatttggggtctaccccaaacctaataacccaaatttggggatggggcccaggaatatgcatttttaaaaagtcatctgcccttcccaggtgattctgtaagttgtccctcaactgtacttggagaaatcgtgttttaaagcagtagtccacaaagtattctgctcatgtgcccccaaaagtattttgaaaaatcatgtataccctcacccatctaagttgatatctaaaattttatctaagttggtatctaaaatttttcatgggaagttaaatagttgacaaagtatgtatttgctggtgtcgtgtaaatattggtattttaaaataaaaactgttacatcactaaaaaaaaaaaaaaaaaaaaaaaa

SEQ ID NO: 267 - DNA, 1534 bp, Homo sapiens
  misc_feature (1212)..(1212): n equals a,t,g, or c
tcgaagataggttcgagacggtggatgttgcagctgatcatgcagttgggttcggtgctgctcacacgctgccccttttggggctgcttcagccagctcatgctgtacgctgagagggctgaggcacgccggaagcccgacatcccagtgccttacctgtatttcgacatgggggcagccgtgctgtgcgctagtttcatgtcctttggcgtgaagcggcgctggttcgcgctgggggccgcactccaattggccattagcacctacgccgcctacatcgggggctacgtccactacggggactggctgaaggtccgtatgtactcgcgcacagttgccatcatcggcggctttcttgtgttggccagcggtgctggggagctgtaccgccggaaacctcgcagccgctccctgcagtccaccggccaggtgttcctgggtatctacctcatctgtgtggcctactcactgcagcacagcaaggaggaccggctggcgtatctgaaccatctcccaggaggggagctgatgatccagctgttcttcgtgctgtatggcatcctggcccctggcctttctgtcaggctactacgtgaccctcgctgcccagatcctggctgtactgctgccccctgtcatgctgctcattgatggcaatgttgcttactggcacaacacgcggcgtgttgagttctggaaccagatgaagctccttggagagagtgtgggcatcttcggaactgctgtcatcctggccactgatggctgagttttatggcaagaggctgagatgggcacagggagccactgagggtcaccctgccttcctccttgctggcccagctgctgtttatttatgctttttggtctgtttgtttgatcttttgcttttttaaaattgttttttgcagttaagaggcagctcatttgtccaaatttctgggcttcagcgcttgggagggcaggaaccctggcactaatgctgtacaaggtttttttcctgttaggaagaacttgaggccagctgcccactgagtcttctgtccctgaagaaagggagtattgggcagggcttgggatccggctactgagagtgggagagtgggagacagaggaaggaagatggagattggaagtgagcaaatgtgaaaaattcctctttgaacctggcagatgcagctaaactctgcagtagtgtttggagactgtganagggagtgtgtgtgttgacacatgtggatcaggcccaggaagggcacaggggctgagcactacagaagtcacatgggttctcagggtatgccaggggcagaaacagtaccggctctctgtcactcaccttgagagtagagcagaccctgttctgctctgggctgtgaaggggtggagcaggcagtggccagctttgcccttcctgctgtctctgtttctagctccatggttggcctggtgggggtggagttccctcccaaacaccagaccacacagtcctccaaaaataaacattttatatagacaaaaaaaaaaaaaaaaa

SEQ ID NO: 268 - DNA, 2664 bp, Homo sapiens
ggttgctggcccaggtgagcgggcgcgctggtccaggtgagcgggcgcgtccccgcgacggcgctgcctgcccgaggcggttcacgtaaagacagcgagatcctgagggccagccgggaaggaggcgtggatatggagctggctgctgccaagtccggggcccgcgccgctgcctagcgcgtcctggggactctgtggggacgcgccccgcgccgcggctcggggacccgtagagcccggcgctgcgcgcatggccctgctctcgcgccccgcgctcaccctcctgctcctcctcatggccgctgttgtcaggtgccaggagcaggcccagaccaccgactggagagccaccctgaagaccatccggaacggcgttcataagatagacacgtacctgaacgccgccttggacctcctgggaggcgaggacggtctctgccagtataaatgcatgacggatctaagcctttcccacgttatggttataaaccctccccaccgaatggatgtggctctccactgtttggtgttcatcttaacattggtatcccttccctgacaaagtgttgcaaccaacacgacaggtgctatgaracctgtggcaaaagcaagaatgactgtgatgaagaattccagtattgcctctccaagatctgccgagatgtacagaaaacactaggactaactcagcatgttcaggcatgtgaaacaacagtggagctcttgtttgacagtgttatacatttaggttgtaaaccatatctggacagccaacgagccgcatgcaggtgtcattatgaagaaaaaactgatctttaaaggagatgccgacagctagtgacagatgaagatggaagaacataacctttgacaaataactaatgtttttacaacataaaactgtcttatttttgtgaaaggattattttgagaccttaaaataatttatatcttgatgttaaaacctcaaagcaaaaaaagtgagggagatagtgaggggagggcacgcttgtcttctcaggtatcttccccagcattgctcccttacttagtatgccaaatgtcttgaccaatatcaaaaacaagtgcttgtttagcggagaattttgaaaagaggaatatataactcaattttcacaaccacatttaccaaaaaaagagatcaaatataaaattcatcataatgtctgttcaacattatcttatttggaaaatggggaaattatcacttacaagtatttgtttactatgaaattttaaatacacatttatgcctagaaggaacggactttttttttctattttaattacacataatatgtaattaaagtacaacataatatgttgtttctctgtagcccgttgagcatatgagtaagtcacatttctattaggactacttmcaaggacaaggtttccatttttccagttgtaaaattggaaccatcagctgataacctcgtagggagcaaccccaggatagctaagtgttatgtaatatgcctagaaggtgatgtgaatgcgattcagaagcatagccactcccattttatgagctactcacatgacaaatgtcatcttttgctataacctttgccaagttagagaaaagatggatttaatgagataaatgaaaagatatttamcctaatatatcaaggcactatttgctgttatgctttgttatttatttcccagcacttgttccttattgtagattttttaaagactgtaaccttttactaactgtggtcttactaaaatttgtgcttgatactgcttttcaaaaagcctttaattagagccaaaaggatggaaaaggcaagatataaatgccttttatagatctcttatttacattgaaaattattaccatatgtttagagcaaatccaagaaaacttcaacagcttctgaagatgtctatgaatgttgaaaacttttcaatctcttggaatgctcagttatgttcctagaccggtctttgctgactactggttgttaacctttccctagcctgggacctcaagccatatatatcctttgggtgacccatggccaaagttattaagatgaactgactttcaaagtcagagaaggacagcatagggagaggcggttatttgtaagtcattacaggtagaacagggcagaaggaaaagtatgttctggagaaagggccatgttcctaactttggagatatgtcattgccgggaacctagtatcttccaacttgaattggtggcagctgttccagtgagacaaggcacatgtatgccttgtggctaagtgagcaaactgggtttccacttaaatgtttgggaccctcaattgattctttatttcaaacctttataaaaggtacagttttgtaagccattattaataattaatgcttatcggctgggcacagtggctcacacctataatcccagcacttgggaggctgaggcggttggatcacttgaggtcaggagtttgagaccagctggccaacatggtgaaacagcgtctctactaaaaatacaaaaatttgccgggcgtggtggcgcatgcttatagtctcagctactcaggaagctgaggtacgagaatcacttgaacccaggaggtggaggttgcagtgagctgagattgtgccactgcactgcagcctggctcgag

SEQ ID NO: 269 - DNA, 1076 bp, Homo sapiens
  misc_feature (1029)..(1029): n equals a,t,g, or c
  misc_feature (1037)..(1037): n equals a,t,g, or c
  misc_feature (1040)..(1040): n equals a,t,g, or c
ggcacgaggggaaagccatgctcccaggactccttccttgcagccttaaatcggtctgtacggaaaattccgcgccttagaaacccacgcttgggtgtaacttattattgttcttcctgacctacttcctgtttatcacttccgggttcatcattttggcatttcggtgatcgggttggaactattgaagcccgctttcaggttcttttccccattttccctttgaaaggaagacttctggcttctcctaaatctccgttctctgggtaaggggagtccaagcctctgtcatgaggaacggaaatgcgagggcctcgggtgttactctaaaatccgccctcagcttgcacgccggaagctgcgattcctgcagcggaagaggcgtgatctggccttcgactcgctatgtccactaacaatatgtcggacccacggaggccgaacaaagtgctgaggtacaagcccccgccgagcgaatgtaacccggccttggacgacccgacgccggactacatgaacctgctgggcatgatcttcagcatgtgcggcctcatgcttaagctgaagtggtgtgcttgggtcgctgtctactgctccttcatcagctttgccaactctcggagctcggaggacacgaagcaaatgatgagtagcttcatgctgtccatctctgccgtggtgatgtcctatctgcagaatcctcagcccatgacgcccccatggtgataccagcctagaagggtcacattttggaccctgtctatccactaggcctgggctttggctgctaaacctgctgccttcagctgccatcctggacttccctgaatgaggccgtctcggtgcccccagctggatagagggaacctggccctttcctagggaacaccctaggcttacccctcctgcctcccttcccctgcctgctgctgggggagatgctgtccatgtttctaggggtattcatttgctttctcgttgaaacctgttgttaataaagtttttcactctgaaaaaaaaaaaaaaaanaraaaacncgngggggggcccggaacccaattcsccggatagtgagt

SEQ ID NO: 270 - DNA, 943 bp, Homo sapiens
ggcacgagctccgcccggccccgaggggctctccccggaggctcagccccctctgctccccatgggcaactgccaggcagggcacaacctgcacctgtgtctggcccaccacccacctctggtctgtgccactttgatcctgctgctccttggcctctctggcctgggccttggcagcttcctcctcacccacaggactggcctgcgcaccctgacatcccccaggactgggtctcttttttgagatcttttggccagctgaccctgtgtcccaggaatgggacagtcacagggaagtggcgagggtctcacgtcgtgggcttgctgaccaccttgaacttcggagacggtccagacaggaacaagacccggacattccaggccacagtcctgggaagtcagatgggattgaaaggatcttctgcaggacaactggtccttatcacagccagggtgaccacagaaaggactgcaggaacctgcctatattttagtgctgttccaggaatcctaccctccagccagccacccatatcctgctcagaggagggggctggaaatgccaccctgagccctagaatgggtgaggaatgtgttagtgtctggagccatgaaggccttgtgctgaccaagctgctcacctcggaggagctggctctgtgtggctccaggctgctggtcttgggctccttcctgcttctcttctgtggccttctctgctgtgtcactgctatgtgcttccacccgcgccgggagtcccactggtctagaacccggctctgagggcactggcctagttcccgacttgtttctcaggtgtgaatcaacttcttgggccttggctctgagttggaaaaggttttagaaaaagtgaagagctggaatgtgggggaaaataaaaagcttttttgcccaaaaaaaaaaaaaaaaaaaaaaaaaaaaa

SEQ ID NO: 271 - DNA, 941 bp, Homo sapiens
ggcacgagcctggacgcagcagccaccgccgcgtccctctctccacgaggctgccggcttaggacccccagctccgacatgtcgccctctggtcgcctgtgtcttctcaccatcgttggcctgattctccccaccagaggacagacgttgaaagataccacgtccagttcttcagcagactcaactatcatggacattcaggtcccgacacgagccccagatgcagtctacacagaactccagcccacctctccaaccccaacctggcctgctgatgaaacaccacaaccccagacccagacccagcaactggaaggaacggatgggcctctagtgacagatccagagacacacaagagcaccaaagcagctcatcccactgatgacaccacgacgctctctgagagaccatccccaagcacagacgtccagacagacccccagaccctcaagccatctggttttcatgaggatgaccccttcttctatgatgaacacaccctccggaaacgggggctgttggtcgcagctgtgctgttcatcacaggcatcatcatcctcaccagtggcaagtgcaggcagctgtcccggttatgccggaatcattgcaggtgagtccatcagaaacaggagctgacaacccgctgggcacccgaagaccaagccccctgccagctcaccgtgcccagcctcctgcatcccctcgaagagcctggccagagagggaagacacagatgatgaagctggagccagggctgccggtccgagtctcctacctcccccaaccctgcccgcccctgaaggctacctggcgccttgggggctgtccctcaagttatctcctctgttaagacaaaaagtaaagcactgtggtctttgaaaaaaaaaaaaaaaaaaaaaaaaaaaaaaaaaaaaaaaaaaaaaaaaaaaaaaaaaaaaa

SEQ ID NO: 272 - DNA, 988 bp, Homo sapiens
ggcagcagccaccgccgcgtccctctctccacgaggctgccggcttaggacccccagctccgacgtaagtccctctcgcgcgccacctccatccgctgcccctctgcccacgggccgggctcasatgtcgccctctggtcgcctgtgtcttctcaccatcgttggcctgattctccccaccagaggacagacgttgaaagataccacgtccagttcttcagcagactcaactatcatggacattcaggtcccgacacgagccccagatgcagtctacacagaactccagcccacctctccaaccccaacctggcctgctgatgaaacaccacaaccccagacccagacccagcaactggaaggaacggatgggcctctagtgacagatccagagacacacaagagcaccaaagcagctcatcccactgatgacaccacgacgctctctgagagaccatccccaagcacagacgtccagacagacccccagaccctcaagccatctggttttcatgaggatgaccccttcttctatgatgaacacaccctccggaaacgggggctgttggtcgcagctgtgctgttcatcacaggcatcatcatcctcaccagtggcaagtgcaggcagctgtcccggttatgccggaatcattgcaggtgagtccatcagaaacaggagctgacaaccygctgggcacccgaagaccaagccccctgccagctcaccgtgcccagcctcctgcatcccctcgaagagcctggccagagagggaagacacagatgatgaagctggagccagggctgccggtccgagtctcctacctcccccaaccctgcccgcccctgaaggctacctggcgccttgggggctgtccctcaagttatctcctctgytaagacaaaaagtaaagcactgtggtctttgcaaaaaaaaaaaaaaaaaaaaaaaaaaaaaaaaaaaaaaaaaaaaaaaaaaaaaaactcgag

SEQ ID NO: 273 - DNA, 1566 bp, Homo sapiens
cgcgtccggcgcccggcagctgtccaccgatcccggccaccgcccccggccacccccaccccgcgagcccatggaggctccgggaccccgcgccttgcggactgcgctctgtggcggctgttgctgcctcctcctatgtgcccagctggctgtggctggtaaaggagctcgaggctttgggaggggagccctgatccgcctgaatatctggccggcggtccaaggggcctgcaaacagctggaggtctgtgagcactgcgtggagggagacagagcgcgcaatctctccagctgcatgtgggagcagtgccggccagaggagccaggacactgtgtggcccaatctgaggtggtcaaggaaggttgctccatctacaaccgctcagaggcatgtccagctgctcaccaccaccccacctatgaaccgaagacagtcacaacagggagccccccagtccctgaggcccacagccctggatttgacggggccagctttatcggaggtgtcgtgctggtgttgagcctacaggcggtggctttctttgtgctgcacttcctcaaggccaaggacagcacctaccagacgctgtgagtacctggccagcagcaagtacctgagtcccagctcacctcctggttcctgccccaccgttccccttcagtacccagggtgctgtcttctccatgggcaagccctcaggacggtgacagcgtgctccatgtgagccacaccccttttgtctcctccagttggggtgtttcctttgtcagatgttggctgggaccaggactcagcctgggccagtctaggagcccagctgagccctcctgtgtcttttcccttcatgctgccagcagggaagagaaccagtaggtgccagcccaggcaagcctgtggcccgcgtttctgtggctgtgggcaggagctgggccttgtgtctagttgggttttgctctgagaaggggagctgtgcctgaggccctctgtgtgccgtgtgtgctgtggggcgggtcgccacagcctgtgttaaagtgtttgctcttcctctgctgcctcctctcgaggcagggggtccttggctggctgaggcagtgtcaccttcctgagtgtcctctttggcctctgcagaatctgacccctttgggcctggactccatcctgagggcaaaggaggatgcagagggtggcctctgggcacccttgtgggtaagcggggggcgggggcgggaaaaactctggccgccagtttttggctcctgcgggcaccaagcaggctcagtgtctgatgcctgacatctcctcctgtcctgggcctggaacctgcagctgagaaaatccctcaaccacctcgtctcctccatcgcccctgctgggccccccagcctgacagtgggttgtatgcctgcctctttccaccaactggcctgggcactgcccccaaataaaggaactctgcactgcaaaaaaaaaaaaaaaaaaaaaaaaaaaaaaaaaaaaaaaaaaaaaaaaaaaaaaaaaaaaaaaaaaaaaaaaaaaaaaaaaaaaaaaaaaaaaaaaaaaaaaaa

SEQ ID NO: 274 - DNA, 1067 bp, Homo sapiens
taccggtccggaattcccgggtcgacccacgcgtccggcgcccggcagctgtccaccgatcccggccaccgyccccggccacccccaccccgcgagcccatggaggctccgggaccccgcgccttgcggactgcgctctgtggcggctgttgctgcctcctcctatgtgcccagctggctgtggctggtaaaggagctcgaggctttgggaggggagccctgatccgcctgaatatctggccggcggtccaaggggcctgcaaacagctggaggtctgtgagcactgcgtggagggagacagagcgcgcaatctctccagctgcatgtgggagcagtgccggccagaggagccaggacactgtgtggcccaatctgaggtggtcaaggaaggttgctccatctacaaccgctcagaggcatgtccagctgctcaccaccaccccacctatgaaccgaagacagtcacaacagggagccccccagtccctgaggcccacagccctggatttgackgggccagctttatcggaggtgtcgtgctggtgttgagcctacaggcggtggctttctttgtgctgacttcctcaaggccaaggacagcacctaccagacgctgtgagtacctggccagcagcaagtacctgagtcccagctcacytctggttcctgcccacgttcccttcagtacccagggtgctgtcttctccactggcaagccctcaggacggtgacagcgtgctycatgtgagccacaccccttttgtctyctccagttggggtgtttcctttgtcagatgttggctgggaccaggactcagcctgggccagtctaggagcccagctgagccctcctgtgtcttttcccttcatgctgccagcagggaagagaaccagtaggtgccagcccagcaacctgtggcccgcgtttctgtggctgtgggcaggagctgggccttgtgtctagttgggttttgctctgagaaggggagctgtgctgaggccctctgtgtgccgtgtgtgctgtggggcgggtcgccacagcctgtgttaaagtgtttgctcttcc

SEQ ID NO: 275 - DNA, 2078 bp, Homo sapiens
  misc_feature (1177)..(1177): n equals a,t,g, or c
  misc_feature (1187)..(1187): n equals a,t,g, or c
  misc_feature (2057)..(2057): n equals a,t,g, or c
ggcacgaggagttgtgcagatacctggctgagagctggctcaccttccagattcacctgcaggagctgctgcagtacaagaggcagaatccagctcagttctgcgttcgagtctgctctggctgtgctgtgttggctgtgttgggacactatgttccagggattatgatttcctacattgtcttgttgagtatcctgctgtggcccctggtggtttatcatgagctgatccagaggatgtacactcgcctggagcccctgctcatgcagctggactacagcatgaaggcagaagccaatgcyctgcatcacaaacacgacaagaggaagcgtcaggggaagaatgcacccccaggaggtgatgagccactggmagagacagagagtgaaagcgaggcagagctggctggcttctccccagtggtggatgtgaagaaaacagcattggccttggccatttacagactcagagctgtcagatgaggaggcttctatcttggagagtggtggcttctccgtatcccgggccacaactccgcagctgactgatgtctccgaggatttggaccagcagagcctgccaagtgaaccagaggagaccctaagccgggacctaggggagggagaggagggagagctggcccctcccgaagacctactaggccgtcctcaagctctgtcaaggcaagccctggactcggaggaagaggaagaggatgtggcagctaaggaaaccttgttgcggctctcatcccccctccactttgtgaacacgcacttcaatggggcagggtccccccmagatggagtgaaatgctcccctggaggaccagtggagacactgagccccgagacagtgagtggtggcctcactgctctgcccggcaccctgtcacctccactttgccttgttggaagtgacccagccccctccccttccattctcccacctgttccccaggactcaccccagcccctgcctgcccctgaggaagaagaggcactcaccactgaggactttgagttgctggatcagggggagctggagcagctgaatgcagagctgggcttggagccagagacaccgccaaaaccccctgatgctccacccctggggcccgacatccattctytggtacatcagaccaagaagctcaggccgtggcagagccatgagnccagccgttnaggaaggagctgcaggcacagtagggcttcttggctaggagtgttgctgtttcctcctttgcctaccactctggggtggggcagtgtgtggggaagctggctgtcggatggtagctattccaccctctgcctgcctgcctgcctgctgtcctgggcatggtgcagtacctgtgcctaggattggttttaaatttgtaaataattttccatttgggttagtggatgtgaacagggctagggaagtccttcccacagcctgcgcttgcctccctgcctcatctctattctcattccactatgccccaagccctggtggtctggccctttctttttcctcctatcctcagggacctgtgctgctctgccctcatgtcccacttggttgtttagttgaggcactttataatttttctcttgtcttgtgttcctttctgctttatttccctgctgtgtcctgtccttagcagctcaaccccatcctttgccagctcctcctatcccgtgggcactggccaagctttagggaggctcctggtctgggaagtaaagagtaaacctggggcagtgggtcaggccagtagttacactcttaggtcactgtagtctgtgtaaccttcactgcatccttgccccattcagcccggcctttcatgatgcaggagagcagggatcccgcagtacatggcgccagcactggagttggtgagcatgtgctctctcttgagattaggagcttccttactgctcctctgggtgatccaagtgtagtgggaccccctactagggtcaggaagtggacactaacatctgtgcaggtgttgacttgaaaaataaagtgttgattggctagaaaaaaaaaaaaaaaaattnctgcggtccgcaagggaattc

SEQ ID NO: 276 - DNA, 2494 bp, Homo sapiens
  misc_feature (920)..(920): n equals a,t,g, or c
ggagatgtttaaggattacccgccagccataaaaccatcctacgatgtgctgctgctgctgctgctgctagtsytcctsctgcaggccggcctcaacacgggcaccgccatccagtgygtgcgcttcaaggtcagtgcaaggctgcagggtgcatcctgggacacccagaacggcccgcaggagcgcctggctggggaggtggccaggagccccctgaaggagttcracaaggagaaagcctggagagccgtcgtggtgcaaatggcccagtgacccccagacgcggaaaccgggtggcagckcccagcctggccccaagcatggaaacgcacaacccctaatcgccctgagctactgcttctaacacctcttttcccttgtgtgagggcaaaccaggctgcaggtggggttttcacttcctagggtagtttaattttaaaataggccaatgttggctagtctgtgcctcagtgagatcagtcagctccgagtggctcccgtgtcgtaacagcaggagcatggccgcaacttcccaggccgaggaagggcccccggctcggcctcttgagagccccacccctgaactggccccagctcctcttcctgcctctctcatggcttgggctggagtgggctctctggacctgaccagactgtgggtccctgcgtctcctgcccactctgaccgggcttcctccctccacgcttagggtctgtcccgggtactcagtcagcccagtgggatcttacccacttccctgcaaggtgcacctgccccaggctcaggctgcccagcggctcttcctggacagtgagagcagggctgggcgcctctgtcctggcccgggagccgcaggggcccctcctccagagcctgggcgcaagcgacacaggctgccgctgctctccaggtgaaatncacaccagtccacgccgggtcgcctgccctgtctccctacttagacccagtcattctagagggatccamcgccamactggccggcccacgtcctgggtgctgtcatgcccagcttggagtgccacgtggccgctgcccacgtcccgggcactgtcatgcccagcttggagtgccacatggccgctgcccacgtcccgggcactgtcatgcccagcttggagtgccacgtggccgctgctgtgacaggcagtgttcttgggggtggggctgcatccaaggctttgtaaaccggctggaccacgtctccctggccccagtgaccgggggaagctgagcccctccctcctgtgtttgctcccattactcaaaatgcaggacagatcaggtcagagcccaggaattctcacaggttcacccagcgccctctacctcctagcaagtactttgtcttgatcctcactgagaaggccccagggcagtggtcttctccatctccgctgttttggggtcttagggtacagcccaggcggtcactgcccacctgccaggctgcagggacagttgggtgtgagaataacactggctttgggtagtgccatggccaggagtgggtttccctgcgtctcctcgtcccgagggcgcctgggtcctcccagctgacggcagtaaatccacagtgagttggggcgactgtgaaactggaatgctgttactttgataattactttccagcaggtgttttccttcacaatggttttgtttctttccttctgatctgagaagacatgaacgttttctcttcaccgccgtggggtgtattgactggtcccccatgggctgctggaaaggcccggagatgcatctgtggcctggggccatcaagatcaaagaaccaggaggcctgggagatgcagctggatggggcggcctgcagaccctgccagggggtttgaggaccctcccaggtttcccactgcggaacaggagtgactctggctgccaagataccttcatggtgttcatgacaagtggaatcattattttcaaccattgaagggggatgcaggcaagacaccttcccagctgctcctagaggggacaagccaggccctctctgcagtcctcggcagctccggaaggacacagtcaggggccgggcaaacactttggccacagccccaaacaagcgccaccgtgggagaggagaggctgctgtcactggtaccggatgcagaccccaccctgtctgcaggccacccccacctccctgcagctttgaggctggcggggtctgctcctgggaatggggtgggagccacagggacgacccggggcgggctgatgtcttcttgggggcagaccagagagctcaagtttcagagtcagaattaggcacttggagcgtttttgctggcttgcactttcttattttcttattttagagcgcttaaaaaatccggaaaaatggggtttaaaagaactgtctctttcagtctacatttttgtttaatacgcttgagcaataaacgctgacttgcagacgtgaaaaaaaaaaaaaaaaaaaaaaaactcga

SEQ ID NO: 277 - DNA, 845 bp, Homo sapiens
  misc_feature (1)..(1): n equals a,t,g, or c
  misc_feature (4)..(5): n equals a,t,g, or c
  misc_feature (823)..(823): n equals a,t,g, or c
  misc_feature (845)..(845): n equals a,t,g, or c
ntanntaatggcacatctccccttctattgggaacacaagctggagctccaccgcggtggcggccgctctagaactagtggatcccccgggctgcaggaattcggcacgaggtcaaggcaaaaatgggtcaggtttggagagttcccccactccttttgagtgttcaggttttccttaccatggctcatgctttccatcaagcaccagagttgcagtggcttggcctctggttctgggtgaggttatttgcaggtggagacggggggctgcacctgaacatttctagtgtcaccctccctctccttcatgggaaacagctctccagggaagtaccttcctgccaggggaagccaaggctgggccggccgccctacaaggagccacaggattgcagccatgggtgccacctttcatggaaggggagatttatgggctttcctggaacccccaggctgtcctggccaagaggaaagaggtggttacttcaggagtttgaccttagttagataactaaaagaatacatttcccctcccttttctttatttcctcaataaaaatgtacaaagtatcacccttctccatgccccaatctgtgttaaagtcacaatctatgggtgtagttctgggattctgtcaaattctccttcctgctctccaaaatggacaattgtcgtagggaccacatgcccccagaatacaatggcctctgtgktctactggggtcaagcctgctagaactcagcattcatgacaggggstaagtgtgcatgaaktgacactgactacagstargaaagccaggcgcacaaatgsccctttcnccccaagggccggtctttccan

SEQ ID NO: 278 - DNA, 738 bp, Homo sapiens
  misc_feature (3)..(3): n equals a,t,g, or c
  misc_feature (8)..(8): n equals a,t,g, or c
  misc_feature (566)..(566): n equals a,t,g, or c
  misc_feature (680)..(680): n equals a,t,g, or c
  misc_feature (684)..(684): n equals a,t,g, or c
  misc_feature (703)..(703): n equals a,t,g, or c
  misc_feature (715)..(715): n equals a,t,g, or c
  misc_feature (717)..(717): n equals a,t,g, or c
  misc_feature (731)..(731): n equals a,t,g, or c
ccnctgtnctggccctctatcatttgcctgcctttagacctgcctcaaggatatggcagcgctagcctttagctyccacagcacggatgggggtgatgccagttagaagtgggtagtgaacgtttgctgagctgttcactgtttmtctcttctctttggaagcacctctccgagccatgtgagccccctgatgccaccgagcaggggcagcttcatgaccgatgtctggctgaggctgtggcggacactctcggggttgtctgcaggagagcaagccaggaggacatgggcctggacgacacggcctcgcagcaaagtgtgtcagacgagcagtgacgggcgtgcggccgggcggggaggctggctcccccacacctcccacctgcattgctctccctcgtgctccccaaatcaccacaaccaaccaataccgcratccatgagggactcctcctgtggaaaaggagagctgttccagaacacagaactgatctcaggtttttgaaaaaaaaaaaaaaaaaactcgagggggggcccggtacccaattcgccctatagtgagtcgnattacaattcactggcgtcgttttacaacgtcgtgactgggaaaaccctggcgttacccaacttaatcgccttgcagcacatccccctttcgccagctggcgtaataagcgaanaggnccggaccgatcggcctttnccaacagttggngnagcctgaaatgggngaatggg

SEQ ID NO: 279 - DNA, 2333 bp, Homo sapiens
  misc_feature (2018)..(2018): n equals a,t,g, or c
  misc_feature (2044)..(2044): n equals a,t,g, or c
  misc_feature (2292)..(2292): n equals a,t,g, or c
  misc_feature (2306)..(2306): n equals a,t,g, or c
  misc_feature (2331)..(2332): n equals a,t,g, or c
cacgcgtccgcattttcgtatccctgctgatttcaaaccttcccatggtttagaagcataacctgtaatgtaatgcaagtcccctaactccctggttgctaacattaacttccttaagtaataatcaatgaaagaaattctatgcatggttttgaaataatgtccttgaaagaggaatcaccattaggaaaggtgagtcagggtcctttgtttaatgtgactagtggctcatcatcaccagtgacctggttgggcctactctccttccagaacctgcattgcttcccagacctccccactgagatgcctctaagagccaaaggagtcaacacttgagcctagggtgggctacaacaaaagattctaatttaccttgcttcatctaggtccaggccccaagtagcttgctgaaggaacttaaaaagtagctgttatttattgtattrtataagctaaaaacatttatttttgttgaatcgaaacaattccatgtagcaatcttttttctgttcacggtgtttgtgatagaaccttaaattccgcaagcatcagttttttgaaaaaatgggaattgaccggatagttacaggcaaagattataaatwgctacaacatcatttaacttttataaacatgccttctctctattgaagacatctgatatttttgctggaaagttggatctatcctcagtaactctgccatggaattcctgkttcctggttccagaaaaagaaaagattacatttctgatcataaagaatgtcttgcatatggggaaatttttcaaaatgaaggggggtattatttatgtgggcatgggaaaacttttgccatggctgtttgtcttagtgggcatcttttgatgamattggatcagatatatgtagatgctgatatatgggacacatgtttaggttttggtgcagttgcacaaaactgtgttagtttatatgttactgtgttgcctttatttattctctccaaagtgtctctttatatttgttttacaatctgtgaaagagtataccataatacagaagtattttcatagtctttacctctggattgtcctgtcagtatagccacgttgatgagattacaccagtgcctttgatcatctttaagtatttgagccctgataaatattttggtaacataatccaaattagagacttagagctctggttagcaatcatgtttaaagagaagcttcttaaagctctgtatgctgggagattcatgattattaccaacgttttgatttcatgaaggtgttctcaaatttaaagcacattttcagtaagaacaaaaatatttaatgtttttatcttagacttaacttgatacatttgcatattactatggaagttattcaccttgtccctgtttttctttaagatattttaaaatcatagttatactacagtccttttttaaatgtatcctgatacattgtaaaatattttaatttcattgtggaaaataatgttggataaggagatatttttcactgttaacttttagcccatgcattttcataatttatttttttcacttgctgctttatatgacatatgtgacatttgattatttaacacttgatgtgatctgcataaacccaagttgcacaaccctcctgctgaagataaaattgaggttaaagataaagatttattttcatatttgtacagtgatcggcttcagtgatggtttttgtgggcatttattgtgtgtgtgtaagaaatttcatatgtatatattaagtaggcctctgagtattgaataattgttttatgattttgatttatatggtttacattttcattgtgtgggccatatttcgtttatactgtttatttctcttcaaaccttaataattataccataaagtgtaatttttatagcaatgcaaatgtctaaggaactacaaatattttctacgttgtaaattcaataaagcttgcttcctttggcaaaaaaaaaaaaaaaaaaaaaaactcgagggggggcccggnacccaattcgccctatagtgagtcgnattacaattcactggccgtcgttttacaacgtcgtgactgggaaaaccctggcgttacccaacttaatcgccttgcagcacatccccctttcgccagctggcgtaatagcgaagaggcccgcaccgatcgcccttcccaacagttgcgcagcctgaatggcgaatggcaaattgtaagcgttaatattttgttaaaattcgcgttaaatttttgctaaatcagctcattttttaaaaccccccccccnaaaaaaaatttttnaaaggggggggggcccccccccccnng

SEQ ID NO: 280 - DNA, 1746 bp, Homo sapiens
gcgttcgcgcacctccagctcgggccgatgtggaagctttggagagctgaagagggcgcggcggcgctcggcggcgcgctcttcctgctgctcttcgcgctaggggtccgccagctgctgaagcagaggcggccgatgggcttccccccggggccgccggggctgccatttatcggcaacatctattccctggcagcctcatccgagcttccccatgtctacatgagaaagcagagccaggtgtacggagaggtacagccccgacgggccccgggcagggagggccgccaggctggcccgggctggccagggccttcctggttggacttatggccgcccctgggccgactagtcgggacctctccgtgtgccggctgccctttgagggacacccgcttcccgggtctggaagggagaagtcctcgacgccgtgcccccttgcagggggagccccgcccctgccggtgacccactccgggccgaggctccgaggcgatccagtcctgattttcccgctaccgctcgagctcttgctcctgcgcctgcgccgtttggctcgccagccgcgccgccacttcaggtccagggtggacgcatgccctcaggtgcgggcgtcttgcgagtcggcctcgcagctctgtggaagctgcacgcggcttgtcggaaaatcaaggcgttctgagttctagatggttaatagcaggttcttcggtgtctgcagtcgacgaacgactggtgtaggcgtttgctgtgagaatggagaatgcaggggaacgcccctgactgagaagcgggccctgggaaacgattgtgaacgcgtgaatgaattgatgactaaaatccgctgcgggggtcctacagcgcagatggtaatgccgttctgactggctgggaacggcaccttagcagatacttaaaaggcgccttctgtgtgccactgtcactgccaacttggtgactcatttaaaactcataaccagccggtgaggtcggtacttcgctcctcctcattctgcggaggggaaagcagcacggaaatgccctgtgactggcagcggaaaaggcgaccaccgcttgtgtgtgggtgtcccgacgtccggagggggcaggagtttccacgggtcctgggacagagctcacctgttttgttttgaattacacttatttatatgcaactacaggcctgacgctagcggtgaagaaggcagatacagccttttaaggagttggcagatgagtgggagagagaaaactaatctcattatcggccacaggctgtggtcagtgttttgaaggaaaagtacagggatgtttggcaactgtggtatttcaggtttgaccttaaatccttacttaaaccagtttttacaaggattggtctaggtgcccgggcgcggtgctcacgcctataatcccagcactttgggaggccgaggcgggcggatcacgaaatcaggagatcgagaccgtcgtggctaacacggtgaaaccccatctctactaaaagaatacaaaaaattggccgggcgtggtggcgggcacctgtggtcccagctattcgggaggctggggcaggagagtggcgtgaacccgggaggcggagctttcagtgagccgagatcgcgccactgcactccagcctgggcaacagagccagactccgtctcaaaaaaaaaaaaaaaaaagggcggccgctctagaggatccaagcttacgtacgcgtgcatgcgacgtcaatagctcttc

SEQ ID NO: 281 - DNA, 4909 bp, Homo sapiens
  misc_feature (2488)..(2488): n equals a,t,g, or c
  misc_feature (2493)..(2493): n equals a,t,g, or c
  misc_feature (2512)..(2512): n equals a,t,g, or c
  misc_feature (2523)..(2523): n equals a,t,g, or c
gcgtccggtggtggcggcggcgcaagggtgagggcggccccagaaccccaggtaggtagagcaagaagatggtgtttctgcccctcaaatggtcccttgcaaccatgtcatttctactttcctcactgttggctctcttaactgtgtccactccttcatggtgtcagagcactgaagcatctccaaaacgtagtgatgggacaccatttccttggaataaaatacgacttcctgagtacgtcatcccagttcattatgatctcttgatccatgcaaaccttaccacgctgaccttctggggaaccacgaaagtagaaatcacagccagtcagcccaccagcaccatcatcctgcatagtcaccacctgcagatatctagggccaccctcaggaagggagctggagagaggctatcggaagaacccctgcaggtcctggaacacccccctcaggagcaaattgcactgctggctcccgagcccctccttgtcgggctcccgtacacagttgtcattcactatgctggcaatctttcggagactttccacggattttacaaaagcacctacagaaccaaggaaggggaactgaggatactagcatcaacacaatttgaacccactgcagctagaatggcctttccctgctttgatgaacctgccttcaaagcaagtttctcaatcaaaattagaagagagccaaggcacctagccatctccaatatgccattggtgaaatctgtgactgttgctgaaggactcatagaagaccattttgatgtcactgtgaagatgagcacctatctggtggccttcatcatttcagattttgagtctgtcagcaagataaccaagagtggagtcaaggtttctgtttatgctgtgccagacaagatgaatcaagcagattatgcactggatgctgcggtgactcttctagaattttatgaggattatttcagcataccgtatcccctacccaaacaagatcttgctgctattcccgactttcagtctggtgctatggaaaactggggactgacaacatatagagaatctgctctgttgtttgatgcagaaaagtcttctgcatcaagtaagcttggcatcacaatgactgtggcccatgaactggcccaccagtggtttgggaacctggtcactatggaatggtggaatgatctttggctaaatgaaggatttgccaaatttatggagtttgtgtctgtcagtgtgacccatcctgaactgaaagttggagattatttctttggcaaatgttttgacgcaatggaggtagatgctttaaattcctcacaccctgtgtctacacctgtggaaaatcctgctcagatccgggagatgtttgatgatgtttcttatgataagggagcttgtattctgaatatgctaagggagtatcttagcgctgacgcatttaaaagtggtattgtacagtatctccagaagcatagctataaaaatacaaaaaacgaggacctgtgggatagtatggcaagtatttgccctacagatggtgtaaaagggatggatggcttttgctctagaagtcaacattcatcttcatcctcacattggcatcaggaaggggtggatgtgaaaaccatgatgaacacttggacactgcagaggggttttcccctaataaccatcacagtgagggggaggaatgtacacatgaagcaagagcactacatgaagggctctgacggcgccccggacactgggtacctgtggcatgttccattgacattcatcaccagcaaatccgacatggtccatcgatttttgctaaaaacaaaaacagatgtgctcatcctcccagaagaggtggaatggatcaaatttaatgtgggcatgaatggctattacattgtgcattacgaggatgatggatgggactctttgactggccttttaaaaggaacacacacagcagtcagcagtaatgatcgggcaagtctcattaacaatgcatttcagctcgtcagcattgggaagctgtccattgaaaaggccttggatttatccctgtacttgaaacatgaaactgaaattatgcccgtgtttcaaggtttgaatgagctgattcctatgtataagttaatggagaaaagagatatgaatgaagtggaaactcaattcaaggccttcctcatcaggctgctaagggacctcattgataagcagacatggacagacgagggctcagtctcagagcgaatgctgcggagtgaactactactcctcgcctgtgtgcacaactatcagccgtgcgtacagagggcagaaggctatttcagaaagtggaaggaatccaatggaaacttgagcctgcctgtcgacgtgaccttggcagtgtttgctgtgggggcccagagcacagaaggctgggattttctttatagtaaatatcagttttctttgtccagtactgagaaaagccaaattgaatttgccctctgcanacccnaaaataaggaaaagcttcnatggctactanatgaaagctttaagggagataaaataaaaactcaggagtttccacaaattcttacactcattggcaggaacccagtaggatacccactggcctggcaatttctgaggaaaaactggaacaaacttgtacaaaagtttgaacttggctcatcttccatagcccacatggtaatgggtacaacaaatcaattctccacaagaacacggcttgaagaggtaaaaggattcttcagctctttgaaagaaaatggttctcagctccgttgtgtccaacagacaattgaaaccattgaagaaaacatcggttggatggataagaattttgataaaatcagagtgtggctgcaaagtgaaaagcttgaacgtatgtaaaaattcctcccttgccaggttcctgttatctctaatcaccaacattttgttgagtgtattttcaaactagagatggctgttttggctccaactggagatacttttttcccttcaactcattttttgactatccctgtgaaaagaatagctgttagtttttcatgaatgggctatcgctaccatgtgttttgttcatcacaggtgttgccctgcaacgtaaacccaagtgttgggttccctgccacagaagaataaagtaccttattcttctcattttatagtttatgcttaagcacccgtgtccaaaaccctgtaccccatgtttatcattcataaactgtttcatcagtctcctcgaaagactctgaatagtcgactactgaacaatgaacacctggatctgagactaagccggacgatgactgggttaaagctctcccggctcacccctccagacccgctgcccatccctcttccttgctccatgcccaggggctgacttgtaaaggccaagtcatcaagctttcttgccctttggatgttggtcagtggggagccggagagctggagctggggtcggaggaggtagtaggtggaggtgttcttccctgattcccttgcgggatgcctcgggctggcctcccctgagggtcttagctccgagaggggaccctcttttccacacagccttctccacctctggattttggtaactgctccctcctcatcccttcaggattagtggcctcagtgggagtctggcttttactagtcctggcggacttgtggtttctacataatgtgctcgcacttttgcaaaaaatctttttatagaaccctcctcagataattctgagtgtctgtcatctatttccctgactggtacagtatctcttctgaaaaagcagagtgcattcaagtctgtaggaaaacccttttcttagggaggtgattttttttctctctctgcttcttatttggcctactttacaatttctaactaactagttattggcatttactgacagtaaattattgcagtcaccaataaatgatagtacattgtgaaacaaaatatttgctcatattagcaaataggacattctttggctttgaagtctttcttttgtgaagacttcacacacggttgcttcagcacacagttgctgctcaggttttatgtatagatgataataatagaaagcacagtttactaacatggtaaaccaacggagttcaagtcaagtcagttaataccctaagaattagattttatttcttattctgaaaacttgctacacagggacttatctaacccatagtgtgctctgttgctgacttgattcaagttgcagcgtgttttgcgctgactctaaggtgcggaaatcctcacacctggcaaaggagaattcaaactgaactttttgaatataaggcaaaaacttcaagataagggaatatgattgatgattggtacgaaaaatgtcaaaaatgtgttcccctaatacacgacaaaatagagtgacttctggacataaatctgccatttattaaaccattcactacaacaaataaataggtataaaagtggaattggaatttttatacttatttgttgtagtgaatggtttaataaaaatagaaatcactggtaatttccaccccaaactaaactatttcccttcttttaaaaaaatacacaaccaagattttaatgtaaaatattttgctttaattgtattttatgccttgattaatgaaacatggaaatattgattttcagttttggtcacctgaggaacctatctttgtttgcttttggaaaagcccattttctaaacagatacaatattgccacaacaatgtgcagaaacctttttgataataaaaaattgttctttgcctctaaaaaaaaaaaaaaaaaaaaaaaaaaaaaaaaaaaaaaaaaaaaaaaaaaaaaaaaaaaaaaaaaaaaaaaaaaaaaaaaaaaaaaaaaaaaaaaaaaaaaaaaaaaa

SEQ ID NO: 282 - DNA, 1579 bp, Homo sapiens
  misc_feature (1529)..(1529): n equals a,t,g, or c
  misc_feature (1556)..(1556): n equals a,t,g, or c
  misc_feature (1569)..(1569): n equals a,t,g, or c
ggcagagggaacccacgcggaggaaggaagagacgcaggcaggctgcggttacccaagcggccacccgggcctcagggaccccttccccgagagacggcaccatgacccagggaaagctctccgtggctaacaaggcccctgggaccgaggggcagcagcaggtgcatggcgagaagaaggaggctccagcagtgccctcagccccaccctcctatgaggaagccacctctggggaggggatgaaggcaggggccttccccccagcccccacagcggtgcctctccaccctagctgggcctatgtggaccccagcagcagctccagctatgacaacggtttccccaccggagaccatgagctcttcaccactttcagctgggatgaccagaaagttcgtcgagtctttgtcagaaaggtctacaccatcctgctgattcagctgctggtgaccttggctgtcgtggctctctttactttctgtgaccctgtcaaggactatgtccaggccaacccaggctggtactgggcatcctatgctgtgttctttgcaacctacctgaccctggcttgctgttctggacccaggaggcatttcccctgggaacctgattctcctgaccgtctttaccctgtccatggcctacctcactgggatgctgtccagctactacaacaccacctccgtgctgctgtgcctgggcatcacggcccttgtctgcctctcagtcaccgtcttcagcttccagaccaagttcgacttcacctcctgccagggcgtgctcttcgtgcttctcatgactcttttcttcagcggactcatcctggccatcctcctacccttccaatatgtgccctggctccatgcagtttatgcagcactgggagcgggtgtatttacattgttcctggcacttgacacccagttgctgatgggtaaccgacgccactcgctgagccctgaggagtatatttttggagccctcaacatttacctagacatcatctatatcttcaccttcttcctgcagctttttggcactaaccgagaatgaggagccctccctgccccaccgtcctccagagaatgcgcccctcctggttccctgtccctcccctgcgctcctgcgagaccagatataaaactagctgccaacccagcctgtggccaggtcactgtctaccccagcccagcccagccctctgccgcttgtacatacgccatggggaccctgaggaactgaggccacgtcaatccctgtgccgccccattcgcccgttacatcttccaaactgggacggtcaaggctgaaggctcctctgggtttgagggtccaagggacaaggaggagaagcctagcaggatttcagatgcaggagagagacccaggaagcccggcagagcctgagccccaytgcaattyctyctagggstgcacawtcatgtggcyttagggcamaytgtyctgcatccagtctgtgtyctyctgtctttctcatccaggtcaggcattgacatttgtaagaaanggggtaagggacacagctgggcaagtngattggttggcangattgctgtc

SEQ ID NO: 283 - DNA, 587 bp, Homo sapiens
cccacgcgtccgcctggaacctgattctcctgaccgtctttaccctgtccatggcctacctcactgggatgctgtccagctactacaacaccacctccgtgctgctgtgcctgggcatcacggcccttgtctgcctctcagtcaccgtcttcagcttccagaccaagttcgacttcacctcctgccagggcgtgctcttcgtgcttctcatgactcttttcttcagcggactcatcctggccatcctcctacccttccaatatgtgccctggctccatgcagtttatgcagcactgggagcgggtgtatttacattgttcctggcacttgacacccagttgctgatgggtaaccgacgccactcgctgagccctgaggagtatatttttggagccctcaacatttacctagacatcatctatatcttcaccttcttcctgcagctttttggcactaaccgagaatgaggagccctccctgccccaccgtcctccagagaatgcgcccctcctggttccctgtccctcccctgcgctcctgcgagaccagatataaaactagctgccaacccaaaaaaaaaaaaaaaa

SEQ ID NO: 284 - DNA, 2921 bp, Homo sapiens
ccacgcgtccggatttctgaggttctgcaaacaggccaccctgcagttctgtgtggtgaagccactcatggcggtcagcactgtggtcctccaggccttcggcaagtaccgggatggggactttgacgtcaccagtggctacctctacgtgaccatcatctacaacatctccgtcagcctggccctctacgccctcttcctcttctacttcgccacccgggagctgctcagcccctacagccccgtcctcaagttcttcatggtcaagtccgtcatctttctttccttctggcaaggcatgctcctggccatcctggagaagtgtggggccatccccaaaatccactcggcccgcgtgtcggtgggcgagggcaccgtggctgccggctaccatgacttcatcatctgtgtggagatgttctttgcagccctggccctgcggcaccccttcacctacaacgtctatgctgacaagaggctggacgcacaaggccgctgtgcccccatgaagagcatctccagcagcctcaaggagaccatgaacccgcacgacatcgtgcaggacgccatccacaacttctcacctgcctaccagcagtacacgcagcagtccaccctggagcctgggcccacctggcgtggtggcgcccacggcctctcccgctcccacagcctcagtggcgcccgcgacaacgagaagactctcctgctcagctctgatgatgaattctaggtgcgggctgcagtggcggaagtgctggcgccatagccacggtcaggctgtgccccacctccagcctcaccaccaggccaggaggcagctggcacagtgctcacgccgcctttatttattggaccagaaacactcacatgtcgcttccagaggaacgggggacagccaggctcgcccatgggccttcaggaatatttatacatggcccagcctgcactgcccgggcgagggcagaggacactgggagcaaggcttatgcccctgctgcccgtcctgtgctgggggcatgctgggaccagccgcacccaggccccaatgcttgtgtgtggaccagcggctgcagccttctagcccctcctccccgcgagactctcaggctgaggtcggcaagccgtggctcccccacacaccgtgcaataccctgtctgacctgggctcttcccgcctgcatcccttccctgtccacctttgtccagtgctagattcacctcaccccgggcaggagtggggatgtgggcgctctgtggtcctcccctcctgacccaggcctctgtggcatgctgcaaggatcagagccagacaccaggagtcacaggccccacccaggaagggcattcagggcccctgggcaccgcttctgttgaagcaggggcttctgggcccctgggtatccccacctgtcgtggccacacctctgcctgcctcatgccccttcccctggcctaccaaggacagcccacagcccgcactgccggctcacttgggtccttcctcgatagctttgggcagagcccttgcttcctggctgcttcagggctcaggggctcccagccctccttcccaggctgatgctgggtcctctctctctttggggcttctccctcccgtttcaggggaaaggtctgagtctccacgtttcagaccagcttctgggggaaggcagtccggcagggagaccgggaggggtggccacacagtggggagctgggaggtggggggaatggtcccagactcctctcggggcccctatccacacagggcctggtgttctaccccatctggcccctggcccatctcttctgtgccttagtcacatatgaaagcgcccctccctggctccccatctgtcccacacgctccctggggctcttagttcagctgctggcactcgcaggatcctgcagtgctgggcccagagcccttggacaggcctcaggagtggtcaggaccaccaagcccctcctctccccctccacacctctagacctggggcctccggaacccccagcaggctgggcttatactagctcctgacttaggaagagcctcgtgtcacaacacgtgtccctacaggcaaagtgtcctggcatttaaaacccagattatccctgggtttgggctgcagtcacctggagaagctggtagggtaagggagagggaccctgccggtgttcatggggattctttcttttggtccttcctggaatgaacaggttccctccctgccacctgtgaggagagttggggcccagccgtcttcctggcctccttcctttcctcgtggcagaggcctgcatgtgggtgccagaggccagctctccccctccatcttgggggggcggagcagttgggcccaagctgcccgggagggtgggtgcagacacaggctgaggaccagccctggccctgccccgccatctgctttcaccaagctgtctctccaccgtggcttcccttctccctccaggccaaagtgctgctgattcccactcccttggttttcgcctgcccagcgttgctgtttgcgtggagggtggggggagctcagtggcagggaatcagcggtccgtggggtcgtggggacgggaacatgtgcccgaccgctccatcccctcctcctccttaggatgcataacctaccttgtctttttttttttaattttctttccaggtagagtagctctttgtacataaagaatacttgaaaaattaattgtatgatgtatgagaagacagagtctcctagttttgtatcttgttgtatgactgccatgagttccaccagaaagccactctattttggtctctgtgacattttaaatgcgtgacagaagtgagcaaataaagtgaggaagaaatctaaaaaaaaaaaaaaaaaaaaaaaaaaaaaaaaaaaaaaaaaaaaagg

SEQ ID NO: 285 - DNA, 1259 bp, Homo sapiens
  misc_feature (4)..(4): n equals a,t,g, or c
  misc_feature (18)..(18): n equals a,t,g, or c
gggntacaaaagctgganctccaccgcggtggcggccgctctagaactagtggatcccccgggctgcaggaattcggcacgagtccacacagggcctggtgttctaccccatctggcccctggcccatctcttctgtgccttagtcacatatgaaagcgcccctccctggctccccatctgtcccacacgctccctggggctcttagttcagctgctggcactcgcaggatcctgcagtgctgggcccagagcccttggacaggcctcaggagtggtcaggaccaccaagcccctcctctccccctccacacctctagacctggggcctccggaacccccagcaggctgggcttatactagctcctgacttaggaagagcctcgtgtcacaacacgtgtccctacaggcaaagtgtcctggcatttaaaacccagattatccctgggtttgggctgcagtcacctggagaagctggtagggtaagggagagggaccctgccggtgttcactggggattctttcttttggtccttcctggaatgaacaggttccctccctgccacctgtgaggagagttggggcccagccgtcttcctggcctccttcctttcctcgtggcagaggcctgcatgtgggtgccagaggccagctctccccctccatcttgggggggcggagcagttgggcccaagctgcccgggagggtgggtgcagacacaggctgaggaccagccctggccctgccccgccatctgctttcaccaagctgtctctccaccgtggcttcccttctccctccaggccaaagtgctgctgattcccactcccttggttttcgcctgcccagcgttgctgtttgcgtggagggtggggggagctcagtggcagggaatcagcggtccgtggggtcgtggggacgggaacatgtgcccgaccgctccatcccctcctcctccttaggatgcataacctaccttgtctttttttttttaaattttctttccaggtagagtagctctttgtacataaagaatacttgaaaaattaattgtatgatgtatgagaagacagagtctcctagttttgtatcttgttgtatgactgccatgagttccaccagaaagccactctattttggtctctgtgacattttaaatgcgtgacagaagtgagcaaataaagtgaggaagaaatctatatatgagataatatagattgtattgaaaaaaaaaaaaaaaaaaaaaaaaaaaaactccga

SEQ ID NO: 286 - DNA, 1314 bp, Homo sapiens
atgcggcagctcttctatgaccctgacgagtgcgggctgatgaagaaggggggcttgtacttcagtgacttctggaataagctggacgtcggcgcaatcttgctcttcgtggcagggctgacctgcaggctcatcccggcgacgctgtaccccgggcgcgtcatcctctctctggacttcatcctgttctgcctccggctcatgcacatttttaccatcagtaagacgctggggcccaagatcatcattgtgaagcggatgatgaaggacgtcttcttcttcctcttcctgctggctgtgtgggtggtgtccttcggggtggccaagcaggccatcctcatccacaacgagcgccgggtggactggctgttccgagggccgtctaccactcctacctcaccatcttcgggcagatcccgggctacatcgacggtgtgaacttcaacccggagcactgcagccccaatggcaccgacccctacaagcctaagtgccccgagagcgacgcgacgcagcagagccggccttccctgagtggctgacggtcctcctactctgcctctacctgctcttcaccaacatcctgctgctcaacctcctcatcgccatgttcaactacaccttccagcaggtgcaggagcacacggaccagatttggaagttccagcgccatgacctgatcgaggagtaccacggccgccccgccgtgccgcccccgttgatcctcttcagccacctgcagctcttcatcaagagggtggtcctgaagactccggccaagaggcacaagcagctcaagaacaagctggagaagaacgaggaggcggccctgctatcctgggagatctacctgaaggagaactacctccagaaccgacagttccagcaaaagcagcggcccgagcagaagatcgaggacatcagcaataaggttgacgccatggtggacctgctggacctggacccactgaagaggtcgggctccatggagcagaggttggcctccctggaggagcaggtggcccagacagcccgagccctgcactggatcgtgaggacgctgcgggccagcggcttcagctcggaggcggacgtccccactctggcctcccagaaggccgcggaggagccggatgctgagccgggaggcaggaagaagacggaggagccgggcgacagctaccacgtgaatgcccggcacctcctctaccccaactgccctgtcacgcgcttccccgtgcccaacgagaaggtgccctgggagacggagttcctgatctatgacccacccttttacacggcagagaggaagga

SEQ ID NO: 287 - DNA, 2042 bp, Homo sapiens
  misc_feature (2001)..(2001): n equals a,t,g, or c
ggtcagctttcatctcgtcctatctttgttcaggcaaacttctctagttctgttttaataggcatatttgttaggtctgttttttgaaatcctcttttttacattgtttaaagataatgccttggctaaaaagcctgcttcacttttccctgtttttagttgttttctccacattggcagtaaagagccttggcgtcccagtagcagcaggttctcctttttgtattgtggatgttttgcatttcatactgttgtgaagagtggctttgatcatacatgttgttggtatatttgccyttttgctgggggtgtgagaagaaccagagatgagcagaggtacacccagtagacttcccagcctgcagagcctcccgggaagagcttccgtgttcaggtgcttggggccccwccctaggagcctgwctcwcagtcagagcwgggtcccggcttgygttcaggattttgaaacatttgtawggtgattttgttgtttctacacctttctcctcatctttttttttttgtagttaatcgttactaataacagaaaagacatttttggcatggtaattggcacaaagtgaataattgttgaatagatgacttttgaggctttcaaaattcgagtgtccataaaatccatccagagccacctggttcctttttttgaaccacttaacgtaattctggaaaaccttgactgtgggtcttaagtttggtggattgctgcttctcactggctgacctttggaggtcgcatatttcaggatgtgattccacttaggctccatttcacctgacactgcaattctgtgccttcagagggatttgttattgcgaatgatgtggacaacaagcgctgctacctgctcgtccatcaagccaagaggctgagcagcccctgcatcatggtggtcaaccatgatgcctccagcatacccaggctccagatagatgtggacggcaggaaagagatcctcttctatgatcgaattttatgtgatgtcccttgcagtggagacggcactatgagaaaaaacattgatgtttggaaaaagtggaccaccttaaatagcttgcagctacatggcttacagctgcggattgcaacacgcggggctgaacagctggctgaaggtggaaggatggtgtattccacgtgttcactaaaccctattgaggatgaagcagtcatagcatctttactggaaaaaagtgaaggtgctttggagcttgctgatgtgtctaatgaactgccagggctgaagtggatgcctggaatcacacagtggaaggtaatgacgaaagatgggcagtggtttacagactgggacgctgttcctcacagcagacacacccagatccgacctaccatgttccctccgaaggacccagaaaagctgcaggccatgcacctggagcgatgccttaggatattaccccatcatcagaatactggagggttttttgtggcagtattggtgaaaaaatcttcaatgccgtggaataaacgtcagccaaagcttcagggtaaatctgcagagaccagagaaagcacacagctgagccctgcagatctcacagaagggaaacccacagatccctctaagctggaaagtccgtcattcacaggaactggtgacacagaaatagctcatgcaactgaggatttagagaataatggcagtaagaaagatggcgtgtgtggtcctcctccatcaaagaaaatgaagttatttggatttaaagaagatccatttgtatttattcctgaagatgacccattatttccacctattgagtaaggattcagcctttttaattattcatttaaagaaatttactatagagtatcaaatgtacaactgatcacatgtaaccattgttttgtatgtagttctgtctagcttttttttttttttaacctttttaactgcatattagagcaggatgaaactttagaggttactcaatcttttaatttaaggagaaagtaaacanttactttgtgaacatgatagataaaaaaaaactggaccggg

SEQ ID NO: 288 - DNA, 308 bp, Homo sapiens
ggaggcaggaccttgtcctattcattaatcttgcccctcaacagttattttcagaggggcaagaagtgtttcagggttcttggcccttgtttgaccagtcgtcctaaccctcrtgtcttgggtcattgttgttrtaatctggggttaccttttggaaggtcatggggtacccttttgcaaaagttatgggccctmtccttggaaactgcacacacaccatgcagcttacaattcagggagttcacaggtctacagaatcctgggaaactctccatgtccggttctaatccattgtagcttcagtggga

SEQ ID NO: 289 - DNA, 1568 bp, Homo sapiens
  misc_feature (1550)..(1550): n equals a,t,g, or c
  misc_feature (1564)..(1564): n equals a,t,g, or c
ctcatcagccctatgaggtagggaggtaggtattattatcacccttgttagtttttttgttttgttttgttttccagatgagagaatcattgctcacagaagtgaagtaacttttccaaggtcatacaatcagtaagtggcaggcaaggactgaaatccaagttgttaccctccaaagtccctgctctgagaactggaggaattctttatcaaatctaaaatcctcttttagscctgtctgctttaatattccggtctttattgatccttctcttctctaaamcttcagctgtcagtataaaaatcaaggaatttagcmcttgttattgtgtgamcagcttcttgtctctcctgtactgtaagtgggtctagggatttttattctttaaatatccccctgtactcagtagatctttgggagamcaagctcataggcttctaataattctttctttgactgccagctgaattagacagaaggtaagtcctgctgccgtgtcgtgcctaaccccatctttatttcctgtgctgttagagaacagtcttttcttggctggaacaaatactacagcctgctcaactagctaatatgtattgagttcttartatgttccaaggactgctctaagtattttatatatattaactcactgaatcttaaataccctatgagctaagtcctatttttatccccattttacaaaagaggaaactgaatgtaccagtgcatcagtatttgactgagtaaatgaatgactgctttgctgatggatagtattattagcaacaaccctacaaatatgatgttatgtttgcatcatgcagtacagctttatgtaccttatgtcattgtcactcatgattagcaaataggcacgaacatccctattttatagaagaggaamccatggctctaagagggtgagtgattctcaacagtcacatgccatctgtatccttcagtaaacaaggtatttggtccattccaggatcgggggcaagagagatgggagggcctcggtgagaaacactcatattcacaaaaggtactagatagatagacagataaataaataaatagagataaaagctagtaatagcagagatttgatgggaattcagatctttgattcctagtccagtgctctttcttttatgtaaggtgatgggaagcaagtcttaggtccagatctggcagctgctttgatttaggatcttaagccagaagcagcagcgccctaaacaaaaagcatcattttaacttctctgcatttctcacattctcaacaatgaccatgccctactttcataattaaaaacaaacaaataaacagagggggcaaaatgcatccttctgagtgggctggggcttgtagagggattcttgggtttgctctgggatgtctttgggcccctgcacttgtgggcactctgatttatccccacaggccacctggcccaccttatgggctgaggagggcttgatgggcggaggsaagcagagctgaggagctggggaggagctggaaaggactgctagaaggttccantgaagctacaatgngtag

SEQ ID NO: 290 - DNA, 865 bp, Homo sapiens
  misc_feature (13)..(13): n equals a,t,g, or c
  misc_feature (20)..(20): n equals a,t,g, or c
accgcagcctgcngggctcnagcattcctytsgcytcagcctcctgaktagctgggaccmcagytccactaattttgaagttttttkggtagacatgaagtctccctgtgttgcccgggctggtctcaaactcctgacctcaagcagtcctcctgtcttggcctctggaaatgctgggattacaggcgtgagccactgtgctggcctcttttttctttttctttttttttaaggtttttatttgttaaatgggaagtctgtgccatcaactgagcattgtattttctccttagtaagagcctgggtgggccactgggagagaactatacattaaatgtaagtagcctctgggtagagagcccctggctggtttcctttcctttctctccttttctctactttggtgtctggaggcatttcccagactccagtttcttaccaccctcacggattttgctattgtattatcacctcctttatcattcccaaaattgactttatggagactcattaaaagaaagaatcatcggccgggagcgtkgctcacgccacgaaggcgggcgaatcacctgaggtgcggagttcgtgaccagcctgaccaaaacagagaaaccccatctctactaaacaatacaaaattagctgggcgtggtggtgcacgcctgtaatcccagctactggggaggctgggacgggagaatcacttgaacccgggaggcagaggttgcagtgaccaaagatcgcactattgcactccagcctgggcaacaagagcaaaactctatctcaaaaaaaaaaaaaaaaaaaaaaaaaagggcggccgctctagaggatccctcgaggggcccaagcttaggcgtgcatg

SEQ ID NO: 291 - DNA, 1687 bp, Homo sapiens
  misc_feature (1568)..(1568): n equals a,t,g, or c
  misc_feature (1652)..(1652): n equals a,t,g, or c
  misc_feature (1654)..(1654): n equals a,t,g, or c
  misc_feature (1660)..(1661): n equals a,t,g, or c
ccacgcgtccgggcagtggggtgagggcacacaagcagttcagggtcccagcaggaagtggggctgcagggccggggtgggtcctgggcctggccatcaggcagcctagcaggttgttctgggcatggagggggcctggtgtggctgagggcatgcccagggctccctggaggatcccgctctgtgccctgcccaccctgtgcctggggagccctctgccctcacagcccacccaccccattttctatgaccacagagctccgacctggaagatggctcacccaggaggtcccaggagctctcactcccccaggggacctggaggacacccagctctcagacaaaggctgccttgccggcggggggagcccgaaacagccctttgcagctctgcaccaggagcaggttttgcggaacccccatgtaaggcttccccggggtggggtcctcccagccgtgggcctcagggtgaccgatcacagggagagtggctccctgccctgggcaccccctgcggtggccccgacgacagctgaggagtgaccacaaggtctctgcccacagtgctcggggtgcggtgtctgggctgcgaagtggatccccctcctttcttgggcactgcagcagcttggggggctttttggacgtggatgtgcctggtcctggtttcccgagggcctttacagtggatgaggaggtgaacacagggagtcctgagagcaagcaccacctcgggctttggtgtagaaacaatggcccggaccccaggccggagccgtggcttggcctcctgggtgtgtcttggcatctgaaatgcaggctacccacaccggctcacctccaggggtacaggcaggtcccacagggagagcttggcgctgagctgaggctgtctgggctcctcgcctcccaaccagtctgcagttacaggggccagtggatgggcgggtgagaaggacgggttccctcaggggagccggccggagcccgagccttcccccttctccaggacgcaggcctgagcagcggggagccgcccgagaaggagcggcggcgcctcaaagagagttttgagaactaccgcaggaagcgcgccctcaggaagatgcagaaaggatggcggcagggtggaggaggaccgggagaacaccacgggcagcgacaacaccgacactgagggctcctagccgcagcagccgcaggccccgaccagggcacacccaccggcccggcctcctgccacccgggggtgccgacgccctggggcgcagacttccccgagccgtcgctgacttggcctggaacgaggaatctggtgccctgaaaggcccagccggactgccgggcattggggccgtttgttaagcggcactcattttgcggaggccatgcgggtgctcaccacccccatgcacacgccatctgtgtaacttcaggatctgttctgtttcaccatgtaacacacaatacatgcatgcattgtattagtgttagaaaacacagctgcgtaaataaacagcacgggtgacccgcaaaaaaaaaaaaaaaaaaaaaaaaaaaaaaaaaanaaaaaaaaaaaaaaaaaaaaaaaaaaaaaaaaaaaaaaaaaaaaaaaaaaaaaaaaaaaaaaaaaaaaaaaaaaaaaaaaaaananaaaaannaaaaaaaaaaaaaaaaaaaaaaaaaa

SEQ ID NO: 292 - DNA, 570 bp, Homo sapiens
  misc_feature (5)..(5): n equals a,t,g, or c
  misc_feature (16)..(16): n equals a,t,g, or c
  misc_feature (496)..(496): n equals a,t,g, or c
  misc_feature (523)..(523): n equals a,t,g, or c
  misc_feature (531)..(531): n equals a,t,g, or c
ttccngtgccactatngaatgtacgcctgcaggtaccggtccggaattcccgggtcgacccacgcgtccgggcagtggggtgagggcacacaagcagttcagggtcccagcaggaagtggggctgcagggccggggtgggtcctgggcctggccatcaggcagcctagcaggttgttctgggcatggagggggcctggtgtggctgagggcatgcccagggctccctggaggatcccgctctgtgccctgcccaccctgtgcctggggagccctctgccctcacagcccacccaccccatttwctatgaccacagagctccgacctggaagatggctcacccaggaggtcccaggagctctcactcccccaggacctggargacacccagctctcagacaaargctgccttgccggcggggggagcccgaaacagccctttgcagctctgcaccaggagcaggttttgcggaacccccatgtaaggcttccccggngtggggtcctccagccgtgggcctcanggtgaccnatcacagggagagtggctccctgtcctgggcaccccctg

SEQ ID NO: 293 - DNA, 1752 bp, Homo sapiens
  misc_feature (1099)..(1099): n equals a,t,g, or c
aaggtacgcctgcaggtaccggtccggaattcccgggtcgacccacgcgtccgtccaggacagagagtgcacaaactacccagcacagccccctccgccccctctggaggctgaagagggattccagcccctgccacccacagacacgggctgactggggtgtctgccccccttgggggggggcagcacagggcctcaggcctgggtgccacctggcacctagaagatgcctgtgccctggttcttgctgtccttggcactgggccgaagcccagtggtcctttctctggagaggcttgtggggcctcaggacgctacccactgctctccgggcctctcctgccgcctctgggacagtgacatactctgcctgcctggggacatcgtgcctgctccgggccccgtgctggcgcctacgcacctgcagacagagctggtgctgaggtgccagaaggagaccgactgtgacctctgtctgcgtgtggmtgtccacttggccgtgcatgggcactgggaagagcctgaagatgaggaaaagtttggaggagcagctgacttaggggtggaggagcctaggaatgcctctctccaggcccaagtcgtgctctccttccaggcctaccctactgcccgctgcgtcctgctggaggtgcaagtgcctgctgcccttgtgcagtttggtcagtctgtgggctctgtggtatatgactgcttcgaggctgccctagggagtgaggtacgaatctggtcctatactcagcccaggtacgagaaggaaytcaaccacacacagcagctgcctgactgcagggggctcgaagtctggaacagcatcccgagctgctgggccctgccctggctcaacgtgtcagcagatggtgacaacgtgcatctggttctgaatgtctctgaggagcagcacttcggcctctccctgtactggaatcaggtccagggccccccaaaaccccggtggcacaaaaacctgactggaccgcagatcattaccttgaaccacacagacctggttccctgcctctgtattcaggtgtggcctctggaacctgactccgttagacgaacatctgccccttcaggnaggacccccgcgcacaccagaacctctggcaagccgcccgactgcgactgctgaccctgcagagctggctgctggacgcaccgtgctcgctgcccgcagaagcggcactgtgctggcgggctccgggtggggacccctgccagccactggtcccaccgctttcctgggagaaygtcactgtggacaaggttctcgagttcccattgctgaaaggccaccctaacctctgtgttcaggtgaacagctcggagaagctgcagctgcaggagtgcttgtgggctgactccctggggcctctcaaagacgatgtgctactgttggagacacgaggcccccaggacaacagatccctctgtgccttggaacccagtggctgtacttcactacccagcaaagcctccacgagggcagctcgccttggagagtacttactacaagacctgcagtcaggccagtgtctgcagctatgggacgatgacttgggagcgctatgggcctgccccatggacaaatacatccacaagcgctgggccctcgtgtggctggcctgcctactctttgcctgcgctttccctcatcctccttctcaaaaaggatcacgcgaaagggtggctgaggctcttgaaacaggacgtccgctcgggggcggccgc

SEQ ID NO: 294 - DNA, 536 bp, Homo sapiens
  misc_feature (508)..(508): n equals a,t,g, or c
ggtcgacccacgcgtccgcccacgcgtccggcttccttaatgtaatttaaaccctggcaaacattctttagaaaccaagaggaaagaaagaacaaatatcaaaaaagacatagaatttaatattgatacaatttcacctctaaaatggatttgaagaaatgcaactttatatcaaaaaatgtcatctgatttcctttgtttcttttttaaattatgtaatcagatgattttatgtttttttttcaggggagcggaatattggtttcttttacttgttgttttcagttttctctgccattcatgtttcttttttgtgttcagtgtttcaaatacaatttgtatttaaggattttaaaataccaaactgtaactgagtacagtggatcgttttctgttaggatgttaatattatacaatgaaatctataaagtgttgtcaatttgattattgacacatataacatgtttacaaataaactgtggtattgatcaaaaaaaaaaaaaaaaancccggggggggccccggaacccaatccc

SEQ ID NO: 295 - DNA, 427 bp, Homo sapiens
ccacgcgtccggtgggctcactgttgggctccagcctagtggcactgctgtccttgcccgggggctggctgcactgccccaaggactttgggaacatcaacaattgccggatggacctctacttcttcctgctggctggcattcaggccgtcacggctctcctatttgtctggatcgctggacgctatgagagggcgtcccagggcccagcctcccacagccgtttcagcagggacaggggctgaacaggccctattccagcccccttgcttcactctaccggacagacggcagcagtcccagctctggtttccttctcggtttattctgttagaatgaaatggttcccataaataaggggcatgagcccttcctcaaaaaaaaaaaaaaaaaaaaaaaaaaaaaaaaaaaaaaaaaaaaaaaaaaa

SEQ ID NO: 296 - DNA, 2409 bp, Homo sapiens
  misc_feature (694)..(694): n equals a,t,g, or c
  misc_feature (716)..(716): n equals a,t,g, or c
  misc_feature (755)..(755): n equals a,t,g, or c
  misc_feature (761)..(761): n equals a,t,g, or c
  misc_feature (791)..(791): n equals a,t,g, or c
  misc_feature (808)..(808): n equals a,t,g, or c
  misc_feature (880)..(880): n equals a,t,g, or c
ccacgcgtccggcgagacgcgttcaccaccatatgcactgttgtcaactcccctggagatgcgcccaagccccacaggaagccttcctcctctgcctcctcttcctcatcctcgtcctcgttctccttggatgcagccggggcctccctggccacactccctggaggctccatcctgcagccgcggccctccttgcccctctcctccacgatgcacttggggcctgtggtttccaaggccctgagtacctcttgccttgtttgctgcctctgccaaaacccggccaacttcaaggaccttggggacctctgtgggccctactaccctgaacactgcctccccaaaaagaagccaaaactcaaggagaaggtgcggccagaaggcacctgtgaggaggcctcgctgccgcttgagagaacactcaaaggtcccgagtgtgcagctgccgccactgccgggaagccccccaggcctgacggcccagctgacccggccaagcagggcccactgcgcaccagtgcccggggcctgtcccggaggctgcagagctgctactgctgtgatggccgggaggatgggggcgaggaggcagccccagccgacaagggtcgcaaacatgagtgcagcaaggaggctccggcagagcccggcggggaggcccaggagcactgggtgcatgaggcctgtgccgtgnggaccggcggcgtctacctggnggccgggaagctctttgggctgcaggaggccatgaaggnggccgnggacatgatgtgttccagctgccaagaagncggggccaccatcgggngctgccacaaaggatgcctccacacctaccactacccgtgtgccagcgatgcaggttgcatattcatcgaanagaacttttctttgaaatgtcccaaacataagaggctgccgtagtaatccaccccaacggccggaggagccgccggagcccgcctgcccgcccgccgccgaaggagaggagccgcctgcgcagcccccgggcctttgagctgctcccagcgctggtccagagccgatccttgatccgggtcccggatcgtggatccggccgcctagggctcagacttgcggccccgggttgggaggaaaacccgttccggagccgcctgctcccggaaccggacggcacagggcgttcttgcccaccccaggggccaggcttgcggagggggagcccgcggagcggccagactccccggggcgctcagcctccggcgagggtgggagacggctttgtcctggggacactttccctctggaatctcaagacgacgtggcacacattccacgtgggtgctgccgccaccccagtcggtcgtggcgtgcagctgggagccctgggcttgggggtgggggtcgaaacagtactggaagaggcggagggcggctcctagctccgtggactaggcgggggagaaaggaagcctttctgagagcgggctaggccggcactggagaggccggagcctttggaacaaaccgtgcggaacgcgtccaggggccttcccgcccagcctttgccagatctctcgtgcggttcgggcaaagccggggtagacctgggctatgctcagttaggggttgcgggatccccgagtgtgggcgggactgggacaccctttggcctctgtttgtcccctttccagtcctccaccccacccctggagcccagcctgggagcgcaaaacccaagaagcggccagaacgcacctccggctccggcggacgcgcgaccgttgtgcaccaccagggaccgccgcgcctactctgcacgggagcagggacagcgctagatttcgtgtacaaaacctgtgtacccctctatatatatgttacatagaatgtatatatgttgggaacatgctcgcttctcccgtgtgtcgccgccgtgcgtcgtgcgcccgcaacagagccccaaccgggcctttgccgggtaaggggctaccgcgacgccacttgtccacgcagccaccaccggcccgggccagtccctgccagtccgtccgcctgtccgtccgtgtcctcagctctgtccacgcttcgataggcctgacgcagcccccagcccagggccgccctagcaacttcctgtacatatgactgtaaaatggtaaacgtgtgtattatatctggcctcgttatatagtgtatatatatgtatacatatacatatatataatatatatgaagactgtaaatgttaagacgactagtgttcttattagtatattgcttcacactgaagattgtgtgtatcgagctgtttctaaaagatgtttattttccttaagagtaaaaaacagtcattgcattcagaaaaaaaaaaaaaaaaaaagtcaataaagatacaacgattgttttggaaaaaaaaaaaaaaaa

SEQ ID NO: 297 - DNA, 737 bp, Homo sapiens
  misc_feature (1)..(1): n equals a,t,g, or c
  misc_feature (21)..(21): n equals a,t,g, or c
  misc_feature (369)..(369): n equals a,t,g, or c
nagagggaagagagaaaaagntacaatgcttcgccgtycgsctktmcgkccsygtcctcagctctgtccacgcttcgataggcctgacgcagcccccagcccagggccgccctagcaacttcctgtacatatgactgtaaaatggtaaacgtgtgtattatatctggcctcgttatatagtgtatatatatgtatacatatacatatatataatatatatgaagactgtaaatgttaagacgactagtgttcttattagtatattgcttcacactgaagattgtgtgtatcgagctgtttctaaaagatgtttattttccttaagagtaaaaaacagtcattgcattcagaaaaaaaaaaaaaaaaaangtcaataaagatacaacgattgttttggaaaatctgcagcccgtggattccgaccagattcagctgggagccgggccaggctttaggttggggaatgggaatgaagggaggggctgggggggggggcatgaatggagtcagggagtcggcctttcacagaacaggaaacctcccccgcccctgtgccccctctccagtgtggcggcaggtcgggagggaggaggcttctttgctgtgagatgaccaggggccgggatgggggaggtgagacgtgccagacttcttgcagggagacccaagctgtagctcctgtcccacaacaggtcctggaagtcagtccatcctcccgtgccacccagggacctaat

SEQ ID NO: 298 - DNA, 1471 bp, Homo sapiens
  misc_feature (798)..(798): n equals a,t,g, or c
tttctgaatgcaatgactgttttttactcttaaggaaaataaacatcttttagaaacagctcgatacacacaatcttcagtgtgaagcaatatactaataagaacactagtcgtcttaacatttacagtcttcatatatattatatatatgtatatgtatacatatatatacactatataacgaggccagatataatacacacgtttaccattttacagtcatatgtacaggaagttgctagggcggccctgggctgggggctgcgtcaggcctatcgaagcgtggacagagctgaggacacggacggacaggcggacggactggcagggactggcccgggccggtggtggctgcgtggacaagtggcgtcgcggtagccccttacccggcaaaggcccggttggggctctgttgcgggcgcacgacgcacggcggcgacacacgggagaagcgagcatgttcccaacatatatacattctatgtaacatatatatagaggggtacacaggttttgtacacgaaatctagcgctgtccctgctcccgtgcagagtaggcgcggcggtccctggtggtgcacaacggtcgcgcgtccgccggagccggaggtgcgttctggccgcttcttgggttttgcgctcccaggctgggctccaggggtggggtggaggactggaaaggggacaaacagaggccaaagggtgtcccagtcccgcccacactcggggatcccgcaacccctaactgagcatagcccargtctaccccggctttgcccgaaccgcacgagagatctngcaaargctgggcggraaggcccctgracgcgttccgcacggtttgttccaaaggctccggcctytccagtgccggcctagcccgctctcagaaaggcttcctttctccyccgcctagtccacggagctaggagccgccctccgcctcttccagtactgtttcgacccccacccccaagcccagggctcccagctgcacgccacgaccgactggggtggcggcagcacccacgtggaatgtgtgccacgtcgtcttgagattccagagggaaagtgtccccaggacaaagccgtctcccaccctcgccggaggctgagcgccccggggagtctggccgctccgcgggctccccctccgcaagcctggcccctggggtgggcaagaacgccctgtgccgtccggttccgggagcagkcggctccggaacgggttttcctcccaacccggggccgcaagtctgagccctaggcggccggatccacgatccgggacccggatcaaggatcggctctggaccagcgctgggagcagctcaaaggcccgggggctgcgcaggcggctcctctccttcggcggcgsgcgggcaggcgggctccggcggctcctmcgrccgttggggtggattactacggcagcctcttatgtttgggacatttcaaaggggaattctct

SEQ ID NO: 299 - DNA, 2227 bp, Homo sapiens
  misc_feature (289)..(289): n equals a,t,g, or c
cggacgcgtgggtcgacccacgcgtccgggaaaaarggaaaaratgccgtgtaaaatctcgttctgtgtctgaattgccgtaggctcagatcttcatttgaggttctgtgtctgaattgccgtaggctcagatcttcatttgaggttatgttctataagttaacgttgatcttgtgtgagctttcggtagctggagtaacacaggcggcctcacagcgacctctccagcgccttccaaggcacatctgcagccagcgtaatcctcctgggagatgcctcctcaaggccntgctccagaccacgtggggarggcctgacarccaattcccaggctgtccccacccttgragagtgaccctaaacgctagacagatggggaatgggaaagaaaagaaagctgcagacctcaagttaaaattccctcaaaaacgtttttatttatctgctttttctgaaaggataaaggctttttgaaaattattttctaacaaataacatgaacacttctagaaaccctagaaaaacacaaagtattcaaaatagaaagaaaaattacccattactctttaagccagcattatccattgcggtgcttttggagttgggtgaggccgtagcctctgccaagtcaaggagcccggtggtggctgtggcattcctgcagggttgtttttttttctttgagatggagtctcactcttgtcaccccagctggaatgtggtggtgtaaacagctcactgcagccttgaccctgaggctcaagcgatccttctgccttggcctcctgagtagctgggatcccaggcgagagtcaccacaccctgtccatgttcctgcaggtcttgatatgcgaggacgctgtgtcttccctgccacattttcttcttctttcttgagacagacccttgctccatcacccaggccagagtgtggtsgtgcgaacacggctcactgcagcctcgaccctcaggctcaagcgatcctcacgcctcggacccccaaagtgctgggatcacaggcgagagtcaccatgctggcctgaatcttcagggtattttacggttgaagtgtcacttacttarccatscctgtttcaagagtgtaggtggtcaccctgtctctgycgctgacctggcctggaccctcggctgtgagagggaggggtgggctgggctggaggaacctraagccctcgtgatgtcacaagcccatctggctgggcatcccctgctgtgtcctgagctgcacatgccccaggtggcccccacagcagaggcgagccactgragggtgragggcttccacggacggtcttcaggggragaagaagggcccaggcccccaggagactcaggagaccagagcctggggtcaggggctyagcaggggctyarccagggctggatgtccggagccagccccgmagccctgkgktctttgttcttcgcactcccaccgtccgtgtgaacagctccagccccacctgcgcctccctgtgctgggctccatcagggagcccagaagacgtgtgtgcttctgaaattgggtccctacatgcctttgtcccagtgcaccttgctccttccatttactatcgagatttaaatgcctgttttctccccagaggttgacggatatattcagacgttacgacacggatcaggacggctggattcaggtgtcgtacgaacagtacctgtccatggtcttcagtatcgtatgaccctggcctctcgtgaagagcagcacaacatggaaagagccaaaatgtcacagttcctatctgtgagggaatggagcacaggtgcagttagatgctgttcttcctttagattttgtcacgtggggacccagctgtacatatgtggataagctgattaatggttttgcaactgtaatagtagctgtatcgttctaatgcagacattggatttggtgactgtctcattgtgccatgaggtaaatgtaatgtttcaggcattctgcttgcaaaaaaatctatcatgtgcttttctagatgtctctggytctatagtgcaaatgcttttattagccaataggaattttaaaataacatggaacttacacaaaaggcttttcatgtgccttacttttttaaaaaggagtttattgtattcattggaatatgtgacgtaagcaataaagggaatgttagacgtgtaaaaaaaaaaaaaaaaaaaaaaaaaaaaaaaaaaaaaaaaaaaa

SEQ ID NO: 300 - DNA, 2214 bp, Homo sapiens
  misc_feature (289)..(289): n equals a,t,g, or c
cggacgcgtgggtcgacccacgcgtccgggaaaaarggaaaaratgccgtgtaaaatctcgttctgtgtctgaattgccgtaggctcagatcttcatttgaggttctgtgtctgaattgccgtaggctcagatcttcatttgaggttatgttctataagttaacgttgatcttgtgtgagctttcggtagctggagtaacacaggcggcctcacagcgacctctccagcgccttccaaggcacatctgcagccagcgtamtcctcctgggagatgcctcctcaaggccntgctccagaccacgtgggrarggcctgacaagccaattcccaggctgtccccacccttgragagtgaccctaaacgctagacagatggggaatgggaaagaaaagaaagctgcagacctcaagttaaaattccctcaaaaacgtttttatttatctgctttttctgaaaggataaaggctttttgaaaattattttctaacaaataacatgaacacttctagaaaccctagaaaaacacaaagtattcaaaatagaaagaaaaattacccattactctttaagccagcattatccattgcggtgcttttggagttgggtgaggccgtagcctctgccaagtcaaggagcccggtggtggctgtggcattcctgcagggttgtttttttttctttgagatggagtctcactcttgtcaccccagctggaatgtggtggtgtaaacagctcactgcagccttgaccctgaggctcaagcgatccttctgccttggcctcctgagtagctgggatcccaggcgagagtcaccacaccctgtccatgttcctgcaggtcttgatatgcgaggacgctgtgtcttccctgccacattttcttcttctttcttgagacagacccttgctccatcacccaggccagagtgtggtsgtgcgaacacggctcactgcagcctcgaccctcaggctcaagcgatcctcacgcctcggacccccaaagtgctgggatcacaggcgagagtcaccatgctggcctgaatcttcagggtatttrcggttgargtgycacttacttarccatscctgtttcaagagtgtaggtggtcaccctgtctctgccgctgacctggcctggaccctcggctgtgagagggaggggtgggctgggctggaggaacctraagccctcgtgatgtcacaagcccatctggctgggcatcccctgctgtgtcctgagctgcacatgccccaggtggcccccacagcagaggcgagccactgragggtgragggcttccacggacggtcttcaggggragaagaagggcccaggcccccaggagactcaggagaccagagcctggggtcaggggctmagcaggggctyarccagggctggatgtccggagccagccccgmagccctgkgktctttgttcttcgcactcccaccgtccgtgtgaacagctccagccccacctgcgcctccctgtgctgggctccatcagggagcccagaagacgtgtgtgcttctgaaattgggtccctacatgcctttgtcccagtgcaccttgctccttccatttactatcgagatttaaatgcctgttttctccccagaggttgacggatatattcagacgttacgacacggatcaggacggctggattcaggtgtcgtacgaacagtacctgtccatggtcttcagtatcgtatgaccctggcctctcgtgaagagcagcacaacatggaaagagccaaaatgtcacagttcctatctgtgagggaatggagcacaggtgcagttagatgctgttcttcctttagattttgtcacgtggggacccagctgtacatatgtggataagctgattaatggttttgcaactgtaatagtagctgtatcgttctaatgcagacattggatttggtgactgtctcattgtgccatgaggtaaatgtaatgtttcaggcattctgcttgcaaaaaaatctatcatgtgcttttctagatgtctctggttctatagtgcaaatgcttttattagccaataggaattttaaaataacatggaacttacacaaaaggcttttcatgtgccttacttttttaaaaaggagtttattgtattcattggaatatgtgacgtaagcaataaagggaatgttagacgtgtaaaaaaaaaaaaaaaaaaaaaaaaaaaaaag

SEQ ID NO: 301 - DNA, 1145 bp, Homo sapiens
ttttttttttttttttttttttgactgaactaagtggcttttttattagagaaagccagaattacaaaagacttcccttttcttggggtatggctgtctcagcacaatactcaacataactgcagaactgatgtggctcaggcaccctggttttaattccttgaggatctggcaattggcttacgcaaaaggtcaccatttgaggtcctgccttactaattatgtgctgcccaacaactaaatttgtaatttgtttttctctagtttgagcagggtctgaattttttcatttatttccttttttgccagcagacagacttgagtctgtaaagacaagcaaatacactgacagaagtttaccatagtttctaaaatgtaaaaaagaaaacccccaaaagactcaagaaaattagaccacaaattttgcattgttcattgtagcactattggtaataaaataacaaatgtttgtgcatttttatgtgaagatccttctcgtatttcatttggaaagatgagcaagaggtctgcttccttcattttacttccccttctgtttttgaaaggcagtttcgccaagcttaatgcaagaatatctgactgtttagaagaaagatattgccacaatctctggatggttttccagggttgtgttattactgagcttcatctttccagaatgagcaaaacactgtccagtctttgttacgattttgtaataaatgtgtacattttttttaaatttttggacatcacatgaataaaggtatgtatgtacgaatgtgtatatattatatatatgacatctattttggaaaatgtttgccctgctgtacctcatttttaggaggtgtgcatggatgcaatatatgaaaatgggacattctggaactgctggtcaggggactttgtcgccctgtgcactaaaagggccagattttcagcagccaaggacatccatacccaagtgaatgtgatgggacttaaaagaagtgaactgagacaattcactctggctgtttgaacagcagcgtttcataggaagagaaaaaaagatcaatcttgtattttctgaccacataaaggcttcttctctttgtaataaagtagaaaagctctcctcaaaaaaaaaaaaaaaaaaaaaa

SEQ ID NO: 302 - DNA, 1165 bp, Homo sapiens
ggcacgagccggtatgtggccccgtctggctagtcccgcctagcgcgcccatttcgagcccaagtttccagctcgggtttccaggctcagaattttccaggagtaggttcttgggcagtggctgtgggagctggaatggcgcagctggaaggttactatttctcggccgccttgagctgtacctttttagtatcctgcctcctcttctccgccttcagccgggcgttgcgagagccctacatggacgagatcttccacctgcctcaggcgcagcgctactgtgagggccatttctccctttcccagtgggatcccatgattactacattacctggcttgtacctggtgtcaattggagtgatcaaacctgccatttggatctttggatggtctgaacatgttgtctgctccattgggatgctcagatttgttaatcttctcttcagtgttggcaacttctatttactatatttgcttttctgcaaggtacaacccagaaacaaggctgcctcaagtatccagagagtcttgtcaacattaacactagcagtatttccaacactttatttttttaacttcctttattatacagaagcaggatctatgttttttactctttttgcgtatttgatgtgtctttatggaaatcataaaacttcagccttccttggattttgtggcttcatgtttcggcaaacaaatatcatctgggctgtcttctgtgcaggaaatgtcattgcacaaaagttaacggaggcttggaaaactgagctacaaaagaaggaagacagacttccacctattaaaggaccatttgcagaattcagaaaaattcttcagtttcttttggcttattccatgtcctttaaaaacttgagtatgcttttgcttctgacttggccctacatccttctgggatttctgttttgtgcttttgtagtagttaatggtggaattgttattggcgatcggagtagtcatgaagcctgtcttcattttcctcaactattctactttttttcatttactctctttttttcctttcctcatctcctgtctcaacaaataaataaataaacataaatgcatgcattcatacatacaattgataaatctaatcttggccaaaaaaaacccaaaacaaaataaaaaaaaaaaaaaaaaa

SEQ ID NO: 303 - DNA, 1160 bp, Homo sapiens
  misc_feature (345)..(345): n equals a,t,g, or c
gccggtatgtggcccygtctggctagtccygyctagcgcgcccatttcgagcccaagtttccagctcgggtttccrggctcagaattttccaggagtrggttcttgggcagtggctgtgggagcwggaatggcgcagctrgarggttactrtttctcggccgccttgagctgtacctttttagtrtcctgcctcctcttctccgccttcagccgggcgytgcgagagccctacatggacgagatcttccacctgcctcaggcgcagcgctactgtgagggccatttctccctttcccagtgggatcccatgattactacattacctggcttgtacctggtgtcanttggagtgrtcaaacctgccatttggatctttggatggtctgaacatgttgtctgctccattgggatgctcagatttgttaatcttctcttcagtgttggcaacttctatttactatatttgcttttctgcaagtacaacccagaaacaaggctgcctcaagtatccagagagtcttgtcaacattaacactagcagtatttccaacactttatttttttaactycctttattatacagaagcaggatctatgttttttacyctttttgcgtatttgatgtgtctttatggaaatcataaaacttcagccttccttggattttgtggcttcatgtttcggcaaacaaatatcatctgggctgtcttctgtgcaggaaatgtcattgcacaaaagttaacggaggcttggaaaactgagctacaaaagaaggaagacagacttccacctattaaaggaccatttgcagaattcagaaaaattcttcagtttcttttggcttattccatgtcctttaaaaacttgagtatgcttttgcttctgacttggccctacatccttctgggatttctgttttgtgcttttgtagtagttaatggtggaattgttattggcgatcggagtagtcatgaagcctgtcttcattttcctcaactattctactttttttcatttactctctttttttcctttcctcatctcctgtctcaacaaataaataaataaacataaatgcatgcattcatacatacaattgataaatctaatcttggccaaaaaaaacccaaaacaaaataaaaaaaaaaaaaaaaaactc

SEQ ID NO: 304 - DNA, 802 bp, Homo sapiens
  misc_feature (337)..(337): n equals a,t,g, or c
  misc_feature (359)..(359): n equals a,t,g, or c
ggtgggtgaccagagagtcctgtctatcctaggaggagaacattcagcccaaatcccagccccatcatgcacagatcagagccatttctgaaaatgtcgctgctgattctgcttttcctgggattggcagaagcctgtactcctcgtgaagtcaacttgctgaaagggatcataggtctcatgagcagactgtcaccggatgagatcctaggcttgctgagcctccaagtactgcatgaagaaacaagtggctgcaaggaggaagttaaacccttctcaggcaccaccccatccaggaaaccactccccaagagggaagaacacgtggaayttcctngaaatgcgsctacatggtgrtngacctacctcttcgtatcctacaacaaaggggactggttcactttttcctcccaagtgttactgccaytactgtaacttggaactggacatcagggatgatccctgctgttctttctagtgagcctgctccatctcagcttagccttcacaaggcctccatctcccaggcattctaacctctgaagaaagctctctgtcccctggactgcctgtgtggagggtaatgaactgggtcctttaaggaatggcacctgggtgcccagaggcatggccagaaggtgtctgtgggggccatgccttagggggatgcacccagggcggctgagagagcaactgcaggagtttcccctaaaatctctcctccagatcgttctcgaactttccccactacttccataataaaatgtatacttgttgaaaaaaaaaaaaaaaaaaactcgag

SEQ ID NO: 305 - DNA, 559 bp, Homo sapiens
ggtcgacccacgcgtccggcccatatcacttaaaaagttcaaagccaaacaatgtttaacctctccttttttacattgtatggactttgtatgctgaagcttcattcagcctcctcctggttcacattgttattgttaatatcattatttttgtctgtcgtttattgtcagtctacaaattagatattattattgtttttgttttatacaggcaacatttatctggatttgcatagatgtttaccattttctttactcagtgttttatcaaatacatcctttaggaattcctttaatttggtctcttgttggcrtatgttcagttttcatttgtctattaaatgtttatcacttttttcgtgataggttgttctgctgggttcacaattttaggttgccagttctgtttttttgtttgtttgtttgtttgacacttggaagatattattctagtgtcttcaatattctgtctttggtctttggtcattctaattaccttttctttgtatatgatctgtcccttctccatggcttcttttaaaatcttctctttatcttt

SEQ ID NO: 306 - DNA, 678 bp, Homo sapiens
  misc_feature (11)..(11): n equals a,t,g, or c
  misc_feature (171)..(172): n equals a,t,g, or c
gtatttctttnattatttatttcttgtctctgctacattttacattgagtaaaagtgggatgtgacagtgggaaatcattagtgacttagaaattccagttggtcattgggccaattttgatgctaccttctctcttttatttctcactttaaaataaaatttgcaaaagnnaaaaattaaatatagtatgagtccagttactggcctaaggagctaaaagcattctgggtttgtatgaagacagctgagttataacaaatgagagtactgttgtgtgactgcattaattattccctttttaaatgtacaagagcaaggcattctacctgactgtgttattgagctctgcagcatacatgtgacagagctaaaacaaacaagcaaacaaaagaaaccacagctttaggatactctgttcatgaatatagcctgaaaatgataatcaagaagtaaacttttaccagtattaaggaacattaagctgcctatctctcagtgaatttcagaatgatattttaaaagttagtttaggctgggcactgtagctcatgcctataatcccagcactttgagaggcagaggccaaggcaggaggatcacttgagccccggattttgagaccagcctgggcaacatagcaagacactgtctctaaaaaaaaaaaaaaaagggcggcc

SEQ ID NO: 307 - DNA, 1042 bp, Homo sapiens
  misc_feature (11)..(11): n equals a,t,g, or c
  misc_feature (15)..(15): n equals a,t,g, or c
  misc_feature (941)..(941): n equals a,t,g, or c
  misc_feature (1016)..(1016): n equals a,t,g, or c
  misc_feature (1022)..(1022): n equals a,t,g, or c
  misc_feature (1028)..(1028): n equals a,t,g, or c
ggttcgtcaanaaanctttaagaggtaccccccggaatttttgggtcgacccacgcgtccgctttcttctatttcttgtggatattatggctaataacacarcaagtttagggagtccatggccagaaaacttttgggaggaccttatcatgtccttcactgtatccatggcaatcgggctggtacttggaggatttatttgggctgtgttcatttgtctgtctcgaagaagaagagccagtgctcccatctcacagtggagttcaagcaggagatctaggtcttcttacacccacggcctcaacagaactggattttaccgccacagtggctgtgaacgtcgaagcaacctcagcctggccagtctcaccttccagcgacaagcttccctggaacaagcaaattcctttccaagaaaatcaagtttcagagcttctactttccatccctttctgcaatgtccaccacttcctgtggaaactgagagtcagctggtgactctcccttcttccaatatctctcccaccatcagcacttcccacagtctgagccgtcctgactactggtccagtaacagtcttcgagtgggcctttcaacaccgcccccacctgcctatgagtccatcatcaaggcattcccagattcctgagtagggtggcttttggtttttgtttctttcttgtcttgtcttttattgaaaggaaatcaaaaataggctaaacagaattttgagggcatggcccaaataactcatgagttccaagttgaaacatggttgtgcaagttggacattacaatgtaaaacacattttcttcaaacacgttttcccttttgtttcaaaaaatgtaatattttcccccaagcgttttatatttatgtattttgtattcaatgtgaggcttattaaaaatagtgattctaatgtaagaatcagctaangatgcattatatatattttaattaaaattaaaacttcagawatttgkgggattacaatcccawttacytcccaanggggcnttaaanggggggaaaaaaaa

SEQ ID NO: 308 - DNA, 1556 bp, Homo sapiens
tttttttttttttttttttttttttgaataaaacttgacataaatttatttttatttcacaatccacaaaacatttcaaattaaagaaatacattaaaagtctccagtttttgctttaatttcacatttcatacactcacaatatttaggaaatagtcattttgactgtcttataactgggataagggtgcagcaacaattctgccagatggttaaatgccccagaggatttctgctcttctcttcctaatttgggagctataaagcagtttttactcccaacacaaattcttgataaaaaccatactctttgctgatttttcatgttagacattaaggatgacatgcaagtaaaaaaaaaaaaaaaaaaaaaagtagccctgataccaagttaatattcccttgaaaccttacttggctgctaaatytctttgttgaaaaccaacttataacaaattggttatccggttagcttttttccctttttcttccattttcttcttgctccctctttctcttactttttccttttggcatgtttaattagagaacattttctataagcattattaagaataattgtccttaaggaatgatggataatataagggaaatgaaaataataaagaaaatgctacatggaatctcttattcttgaaccatgttcagacactattagctgtgaccactgcaataggaaatgaaaaagagggtactttttcactgaaaatcccactgttcaaagaaacaaagaaacggccacataaactaaatattcacaatactggaaatgraccacagactttttgagtaatactccagtgaactcatgtccttaaatgagaagggcagccacagacatctgcccactggaactctctggtggccacatttagggatgcattcttccttacaagggcagccacctgtggaagtggattcttaaataactgtgtgcaccaaagaccatctggcatggcttaatcactgtacagactctgcagagaagttggaattgagattcgtagagaagcaaaccaggaatgatgcctgatgattaagagtcaatccaggaaggagaattcttcatgggcaacatctatttcaataacaaactctctccccagtgactcatacttatttgtctgcaaagttacaaaagaagatccccagagaaagtgctttccaagttgctagatgtaagtttaagaaagaaaatttttcccttaagaaaaacgtgagcttggttttaaacttgaggcttgtttttaggtcaaatgaattggattttttcctgttgcttttctaacaatgtaacgacaacggtgaagaaaaggtaaatcatcatgttagtaaatccaaggattttgcctccaggaagtagataactattcttgggaaaaacacataaagagtttgtccagaaaaaattagtgtcaaaaatgaaacatccaatgacaccaaaagagttcagtttcctgtgcttgagtcccacacttcttataatgatcaaatcaaggaactttagaatgtcctatgttctgtcattttgtgcc

SEQ ID NO: 309 - DNA, 615 bp, Homo sapiens
  misc_feature (18)..(18): n equals a,t,g, or c
  misc_feature (20)..(20): n equals a,t,g, or c
  misc_feature (584)..(584): n equals a,t,g, or c
cctgtatataaaattggncnctatggtcccgtacaatgaagaaatgcaaagatagttaagaaagactcggccttcaaggagcctaaatgtgtagaaaaggactaaggcaaaacaataacttttttgagctcttgccatgtgtgaagcactttatacacctgtaaggtaggtaacgttgttcttattaaacatgaagaaaatgagactttgtgagaagcaatacagtatagaagttaagaatatggactctaaagctagatttcagaggtttgaagtagctctgctacttactggctgtgtgactttgagcagattacttaacctgtctgtgcctatgtttacttttattgttgtaaaaagatatgcaacataaaatattccatttcaaccgtttttacgtgtatacttcactgacattagttgcattcactatgttgtgcaaacgtagggtcgctatgaagattaaatgagttaattcatataaagccctcagaagagtgtctggcacatggtgagtattggctgtactgtggtcgatgtcattgttagagagctttagtgatttgcttaagacagaaaggtanactggggtgcggtgggctcacgccctggtta

SEQ ID NO: 310 - DNA, 711 bp, Homo sapiens
  misc_feature (345)..(345): n equals a,t,g, or c
ggcacgagcgaagaccctgttcggaccctgccccgattccagactcaggtagatcgtcggcataccctctaccgtggacaccaggcagccctggggctgatggagagagatcaggtatcccccagggagtaggggctaccttgaggggatgatagacctcccccactcccagtgkkactctggaaatatgaaggaactagggagtggaagagatttcagagctggggagaggagttcctcccttcaaagccagcaactgcctttggggaatgtcggggggtctctcctttctcctgcttgtttraggtggtacacagtccccccttcamctggsgggaagctgtnccggacaractcatctcagctttcccttggggcaggatcgggggcagcagctccagcagaaacagcaggatctggagcaggaaggcctcgaggccacacaggggctgctggccggcgagtgggccccacccctctggragctgggcagcctcttccaggccttcgtgaagagggagagccaggcttatgcgtaagcttcatagcttctgctggcctggggtggacccaggacccctggggcctgggtgccctgagtggtggtaaagtggagcaatcccttcacgctccttggccatgttctgagcggccagcttggcctttgccttaataaatgtgctttattttcaaaaaaaaaaaaaaaaaact

SEQ ID NO: 311 - DNA, 553 bp, Homo sapiens
gtgtgccggatttggttagctgagcccaccgagaggcgcctgcaggatgaaagctctctgtctcctcctcctccctgtcctggggctgttggtgtctagcaagaccctgtgctccatggaagaagccatcaatgagaggatccaggaggtcgccggctccctaatatttagggcaataagcagcattggcctggagtgccagagcgtcacctccaggggggacctggctacttgcccccgaggcttcgccgtcaccggctgcacttgtggctccgcctgtggctcgtgggatgtgcgcgccgagaccacatgtcactgccagtgcgcgggcatggactggaccggagcgcgctgctgtcgtgtgcagccctgaggtcgcgcgcagtggcaacagcgcgggcggaggcggctccaggtccggagggttgcgggggagctggaaataaacctggagatgatgatgatgatgatgatggaaaaaaaaaaaaaaaaaaaaaaaaaaaaaaaaaaaaaaaaaaaaaaaaaaaaaaaaaaaaaaaaaaaaaaaaaaaaa

SEQ ID NO: 312 - DNA, 1614 bp, Homo sapiens
ggtgattggtagttactatgtggggacacaattacttgggctgaaataatccacctgttgtggttggggtcctctggggcattccagggtgagaggttgtcactgccacctgggccatgtgggccggcaccagcattttgtggttacgaattctacagtcacaaatatctttgggcaaatccccttctatacctcaaggcagcttttggtttgcaaccccactggccagagggaagggccagtcacttggctctctcactgccctgcgccccagatggttctagggctgctgttttcccttggccctgccaacaccactgtttttacttctgctcattggctgagtgcagtggttcctggaagccagtggcacgtttccccgcgtagctcgcttatcccacagcacacacccaagggttctgttgctaacacgctgaattaattctttgctcatcttacagagtgtgttttgactgcccccatttctgaggccttgtaaggccagagctttgttgcttcatcggcaggttgggacttagatggccgtgaatgtttcctctctgctgctgcagtaagtaagtgcccgcaccatagtgtgtttggaggctgaagttgaagcgaggctgtgaggggagatggacgtgtgaggagggatgatggggcttgagcaaagtgggggaggggcaaagcagttggcccaacacattccccacccctttgagaggtctgaggcctgcagacctggctcggagcccacctggtagtcctcagactgtgtgtgtgtgtgtgtgtgtgtgtgtgtgtgtgtgtgtgtgtgtgtgtaaaagagagaagttgtggagaaatggggggctgattctgctcagattcatcaggatgagtagaaggcacccagctctcaccctggcctgacatgtgtgtccctgagcaggttacagtcctctctgagcctctgcttcccatctggaccctgctgggcagggcttctgagctccttagcactagcaggaggggctccaggggccctccctccatggcagccaggacaggactctaaaatgaggacagcagagctcgtggggggctcccacggacccgccgtgggcccaggggaggcagagcctgagccaacagcagtggtgctgtggaccgtggatcctgagggtggcctggggcaagtaccggctgagggtccaggtgggctttgtgtacctttgggtcctggggccctggtgacttggactccaggttagagtcaagtgacaggagaaaggctggtggggccctgtgcttccgacttcatttcgagtgatggcagttcccaggaaggaatccacagctgacggtggctgacagatcagagaatggaaggcgaggcaggcgggcgtctgcgtgacctcaggtgcttggggcccagcagacccagagaaccatttccactaggccagggtgccggaagtgtccacaggtcttagattccctgttcagatgaaaagatttgtgcctttaatgataaaagtgatctgcatagagtcaaaaattcaagccatgggtataaaatgcaagtaaaatccctgccctcacctatcccaccctactacacagagatgtcct

SEQ ID NO: 313 - DNA, 1087 bp, Homo sapiens
  misc_feature (14)..(14): n equals a,t,g, or c
  misc_feature (55)..(55): n equals a,t,g, or c
  misc_feature (63)..(64): n equals a,t,g, or c
  misc_feature (174)..(174): n equals a,t,g, or c
caagttaaagtaangtggccccggcaaccaataagtgttgtttttggaagggctngaaagttnnaaagcgagggcttgtaaaggggaagatgggaccgttgtgaaggaaggatgattggggctttgaagcaaaagtgggggaagggggcaaaggcagttggcccaacacattcnccacccctttgagaggtctgaggcctgcagacctggctcggagcccacctggtagtcctcagactgtgtgtgtgtgtgtgtgtgtgtgtgtgtgtgtgtgtgtgtgtgtgtgtaaaagagagaagttgtggagaaatggggggctgattctgctcagattcatcaggatgagtagaaggcacccagctctcaccctggcctgacatgtgtgtccctgagcaggttacagkcctctctgagcctctgcttcccatctggaccctgctgggcagggcttctragctccttagcactagcaggaggggctccaggggccctccctccatggcagccaggacaggactctaaaatgaggacagcagagctcgtggggggctcccacggacccgccktgggcccaggggaggcagagcctgagccaacagcagtggtgctgtggaccgtggatcctgagggtggcctggggcaagtaccggctgagggtccaggtgggctttgtgtacctttgggtcctggggccctggtgacttggactccaggttagagtcaagtgacaggagaaaggctggtggggccctgtgcttccgacttcatttcgagtgatggcagttcccaggaaggaatccacagctgacggtggctgacagatcagagaatggaaggcgaggcaggcgggcgtctgcgtgacctcaggtgcttggggcccagcagacccagagaaccatttccactaggccagggtgccggaagtgtccacaggtcttagattccctgttcagatgaaaagatttgtgcctttaatgataaaagtgatctgcatagagtcaaaaattcaagccatgggtataaaatgtcaagtaaaatccctgccctcacctatcccaccctactacacagagatgtcctctcgagg

SEQ ID NO: 314 - DNA, 1191 bp, Homo sapiens
gctgggctggaacacaagarcccacagggctgccgtccacactctcccggtcagagtcctgggaccacatggggacgctgccatggcttcttgccttcttcattctgggtctccaggcttgggatactcccaccatcgtctcccgcaaggagtggggggcaagaccgctcgcctgcagggccctgctgaccctgcctgtggcctacatcatcacagaccagctcccagggatgcagtgccagcagcagagcgtttgcagccagatgctgcgggggttgcagtcccattccgtctacaccataggctggtgcgacgtggcgtacaacttcctggttggggatgatggcagggtgtatgaaggtgttggctggaacatccaaggcttgcacacccagggctacaacaacatttccctgggcatcgccttctttggcaataagataagcagcagtcccagccctgctgccttatcagctgcagagggtctgatctcctatgccatccagaagggtcacctgtcgcccaggtatattcagccacttcttctgaaagaagagacctgcctggaccctcaacatccagtgatgcccagraaggtttgccccaacatcatcaaacgatctgcttgggaagccagagagacacactgccctaaaatgaacctcccagccaaatatgtcatcatcatccacaccgctggcacaagctgcactgtatccacagactgccagactgtcgtccgaaacatacagtcctttcacatggacacacggaacttttgtgacattggatatcaataaggccaggcgtggcggcgattacgtctgtaatcccaggactttgggaggccaaggcgggcagatcacttcaggccaggaattcaagagcagcctggccaatatggcgaaactctgtctctactgaaaacaaacaaacaaacaaacaaacaaacaaagaaacaacaaaaattagccgggtgtggtggcacacgcctgtagtcccagctactcaggaggctgaggcataagaattgcttgaaccctggaggcggaggttgcagtgagctgagattgggccaccgcactccagtctgggagacagagtgagactgtctcaaaacaacaacaaaaaaatccctaacataatctcaaaaaaaaaaaaaaaaaaaaaaaaaaaaaaaagggcggccgc

SEQ ID NO: 315 - DNA, 1626 bp, Homo sapiens
  misc_feature (525)..(525): n equals a,t,g, or c
  misc_feature (542)..(542): n equals a,t,g, or c
  misc_feature (562)..(562): n equals a,t,g, or c
  misc_feature (607)..(607): n equals a,t,g, or c
ccacgcgtccgacgcggcgcacgcggcagtcctgatggcccggcatgggttaccgctgctgcccctgctgtcgctcctggtcggcgcgtggctcaagctaggaaatggacaggctactagcatggtccaactgcagggtgggagattcctgatgggaacaaattctccagacagcagagatggtgaagggcctgtgcgggaggcgacagtgaaaccctttgccatcgacatatttcctgtcaccaacaaagatttcagggattttgtcagggagaaaaagtatcggacagaagctgagatgtttggatggagctttgtctttgaggactttgtctctgatgagctgagaaacaaagccacccagccaatgaagtctgtactctggtggcttccagtggaaaaggcattttggaggcagcctgcaggtcctggctctggcatccgagagagactggagcacccagtgttacacgtgagctggratgacgcccgtgcctaatgtgcytkgsgggggraaacgactgncccacsggagggaagantggggagtttttccgcccgnaggggggcttgaarggtccaagtttaccccatggggggaactggnttccagccaaaccgcaccaacctgtggcagggaaagttccccaagggagacaaagctgaggatggcttccatggagtctccccagtgaatgctttccccgcccagaacaactacgggctctatgacctcctggggaacgtgtgggagtggacagcatcaccgtaccaggctgctgagcaggacatgcgcgtcctccggggggcatcctggatcgacacagctgatggctctgccaatcaccgggcccgggtcaccaccaggatgggcaacactccagattcagcctcagacaacctcggtttccgctgtgctgcagacgcaggccggccgccaggggagctgtaagcagccgggtggtgacaaggagaaaagccttctagggtcactgtcattccctggccatgttgcaaacagcgcaattccaagctcgagagcttcagcctcaggaaagaacttccccttccctgtctcccatccctctgtggcaggcgcctctcaccagggcaggagaggactcagcctcctgtgttttggagaaggggcccaatgtgtgttgacgatggctgggggccaggtgtttctgttagaggccaagtattattgacacaggattgcaaacacacaaacaattggaacagagcactctgaaaggccattttttaagcattttaaaatctattctctccccctttctccctggatgattcaggaagctgmacattgtttcctcaaggcagaattttcctggttctgttttctcagccagttgctgtggaaggagaatgctttctttgtggcctcatctgtggtttcgtgtccctctgaaggaaactagtttccactgtgtaacaggcagacatgtaactatttaaagcacagttcagtcctaaaagggtctgggagaaccagatgatgtactaggtgaagcattgcattgtgggaatcacaaagcaaatagtactccagaaagaccctgtctcaaaaaaaaaaaaaaaaaaaaaaaaaaaaaaaaaaaaaaa

SEQ ID NO: 316 - DNA, 2351 bp, Homo sapiens
ccacgcgtccggcagaagcagcagcagcagaagacacagcgccggtccaggaggcggctcgagctgttcgtaaagtcgcccgacagctttttctccgtagtatgcgagttgacaaaacagccagagaacagggctccccattacaatcttttcgagatcttttcccttgctaaccggatctgatttgtgcgaaaacatgccttgcacttgtacctggaggaactggagacagtggattcgacctttagtagcggtcatctacctggtgtcaatagtggttgcggttcccctatgcgtgtgggaattacagaaactggaggttggaatacacaccaaggcttggtttattgctggaatctttttgctgtgactattcctatatcactgtgggtgatattgcaacacttagtgcattatacacaacctgaactacaaaaaccaataataaggattctttgggatggtacctatttacagttttagatagttggatagctttgaaatatcccggaattgcaatatatgtggatacctgcagagaatgctatgaagcttatgtaatttacaactttatgggattccttaccaattatctaactaaccggtatccaaatctggtattaatccttgaagccaaagatcaacagaaacatttccctcctttatgttgctgtccaccatgggctatgggagaagtattgctgtttaggtgcaaactaagtgtattacagtacacagttgtcagacctttcaccaccatcgttgctttaatctgtgagctgcttggtatatatgacgaagggaactttagcttttcaaatgcttggacttatttggttataataaacaacatgtcacagttgtttgccatgtattgtctcctgctcttttataaagtactaaaagaagaactgagcccaatccaacctgttggcaaatttctttgtgtaaagctggtggtttttgtttctttttgatttggcgtttaccttttcctaacatataggcaagcagtagttattgctttgttggtaaaagttggcgttatttctgaaaagcatacgtgggaatggcaaactgtagaagctgtggccaccggactccaggattttattatctgtattgagatgttcctcgctgccattgctcatcattacacattctcatataaaccatatgtccaagaagcagaagagggctcatgctttgattcctttcttgccatgtgggatgtctcagatattagagatgatatttctgaacaagtaaggcatgttggacggacagtcaggggacatcccaggaaaaaattgtttcccgaggatcaagatcaaaatgaacatacaagtttattatcatcatcatcacaagatgcaatttccattgcttcttctatgccaccttcacccatgggtcactaccaagggtttggacacactgtgactccccagactacacctaccacagctaagatatctgatgaaatccttagtgatactataggagagaaaaaagaaccttcagataaatccgtggattcctgaacagtatggaaaagcaaactgtgcaactactacattatatcattacctggtatcccatggattttgtgcttgggacagaccataaatgatggaaaatgtcaacacaaaaatagctgaaagccaggtacaactactgcatttatatatgtaagttttgtatatcaaaaataattggtctaaatttcctagacttagacttgatttcttaacattagggtatcgcatactcaaatggtagacaatgaccccaactaaatcttcctgatgttacactgctttatcaagaggatggacttttttttttttgagacagacagagtcttgctctgtcacccaggctggagtgcagtggcgcaatctcgggtcactgcaagctctgcctcccaagttcatgccattctcctgcctcagccctcccaagtagctgggactacaggcacctgccaccatgcccagctaattttttttttttcagtagagacagggtctcaccatgttagccaggatggtcttgatctgacctcgtgatccgccgacctcggcctcccaaagtgctggaattacaggcgtgagccactgcgcctggccaagaatggacattttttaaaaaaacatcagtacttcctaccactgctgcatgagtataatgctccggaattatcagaaagcataatgcagaaatacgaattagtggaacttaatcatgtgccatataagcttacctaacaaacagttatatccctattcctcaactgaatgtctttcaataaataagaatttatcatttaaaaaaaaaaaaaaaaaaaa

SEQ ID NO: 317 - DNA, 1001 bp, Homo sapiens
cgcgctggaaccctgtggcggcggccatggccatatggcgctgcccgcctggctgcagccaggtataggaagaatgcgtatcttttcatctattacttaatccagttctgtggccactcttggatatttacaaatatgacagtcagattcttttcatttggaaaaggtaaaactccgaaacagtttttttatttttaacttttaatccttgttttcacctcatcctgcttatattaaatttctacacacctcaaccttctaccacgggatacagattcaatggttgacactttttatgctattggacttgtgatgcgactttgccaatccgtatctctcctggaactgctgcacatatatgttggcattgagtcaaaccatcttctcccaaggtttttgcagctcacagaaagaataatcatcctttttgtggtgatcaccagtcaagaggaagtccaagagaaatatgtggtgtgtgttttattcgtcttttggaatctattggatatggttaggtacacttatagcatgttatcagtcataggaatatcctatgctgtcttgacatggctcagtcaaacactatggatgccaatttatcctttgtgtgttcttgctgaagcatttgccatctatcaatcgctgccttattttgaatcatttggcacttattccaccaagctgccctttgacttatccatctatttcccatatgtgctgaaaatatatctcatgatgctctttataggtatgtattttacctacagtcatctatactcakaaagaagagacatcctcggaatctttcccattaaaaaaaagaagatgtgaagtacagcattccagtgtgacacgagaaaagacaggctgtggattcagtgcagtaaataaaacacaggaagtattctggtggaaaaaaaaaaaaaaaaaaaaaaaaaaraaraaaaaaaaawaaaaaaaaaaaaaaaaaaaaaaaaaaaaaaaaaaaaaaaaaaaaaaaa

SEQ ID NO: 318 - DNA, 669 bp, Homo sapiens
ccacgcgtccggacactttttatgctattggacttgtgatgcgactttgccaatccgtatctctcctggaactgctgcacatatatgttggcattgagtcaaaccatcttctcccaaggtttttgcagctcacagaaagaataatcatcctttttgtggtgatcaccagtcaagaggaagtccaagagaaatatgtggtgtgtgttttattcgccttttggaatctattggatatggttaggtacacttatagcatgttatcagtcataggaatatcctatgctgtcttgacatgggctcagtcaaacactatggatgccaatttatcctttgtgtgttcttgctgaagcatttgccatctatcaatcgctggcttattttgaatcatttggcacttattccaccaagctgccctttgacttatccatctatttcccatatgtgctgaaaatatatctcatgatgctctttataggtatgtattttacctacagtcatctatactcagaaagaagagacatcctcggaatctttcccattaaaaaaaagaagatgtgaagtacagcattccagtgtgacacgagaaaagacaggctgtggattcagtgcagtaaataaaacacaggaagtattctggtggaaaaaaaaaaaaaaaaaaaaaaaaaaaaa

SEQ ID NO: 319 - DNA, 417 bp, Homo sapiens
ccacgcgtccgctcctctagaggctccacatgaagtcccagtgctacagtcctagttattttgccttcttctgcctggttttctttcagatcacctcagccagttctcagacacttaggggacatgttctctgcaggaccactctgagggactcttctgcatattgctgacctgagaggatggcctcagagctgacttgggcaatcctccccaacaggaaggggagacattgcctgccactgaggaaacaggtcatgaaggtggagataagctgcaaggggcgaagcaactttatgtcagtggaaaacgtgtctctttaaagctgctatgtgaacagcttttacagtcattaaatttacctaaactaaggttaaaaaaaaaaaaaaaaaaaaaaaaaaaaaaaaaaaaaaaaaaaaa

SEQ ID NO: 320 - DNA, 1949 bp, Homo sapiens
  misc_feature (1130)..(1130): n equals a,t,g, or c
  misc_feature (1948)..(1948): n equals a,t,g, or c
gctacgccgtgggcacttcctcaacgacctgtgcgcgtccatgtggttcacctacctgctgctctacctgcactcggtgcgcgcctacagctcccgcggcgcgggctgctgctgctgctgggccaggtggcgacgggctgtgcacaccgctcgtgggctacgaggccgaccgcgccgccagctgctgcgcccgctacggcccgcgcaaggcctggcacctggtcggcaccgtctgcgtcctgctgtccttccccttcatcttcagcccctgcctgggctgtggggcggccacgccgagtgggctgccctcctctactacggcccgttcatcgtgatcttccagtttggctgggcctccacacagatctcccacctcagcctcatcccggagctcgtcaccaacgaccatgagaaggtggagctcacggcactcaggtatgcgttcaccgtggtggccaacatcaccgtctacggcgccgcctggctcctgctgcacctgcagggctcgtcgcgggtggagcccacccaagacatcagcatcagcgaccagctggggggccaggacgtgcccgtgttccggaacctgtccctgctggtggtgggtgtcggcgccgtgttctcactgctattccacctgggcacccgggagaggcgccggccgcatgcggaggagccaggcgagcacacccccctgttggcccctgccacggcccagcccctgctgctctggaagcactggctccgggagccggctttctaccaggtgggcatactgtacatgaccaccaggctcatcgtgaacctgtcccagacctacatggccatgtacctcacctactcgctccacctgcccaagaagttcatcgcgaccattcccctggtgatgtacctcagcggcttcttgtcctccttcctcatgaagcccatcaacaagtgcattgggaggaacatgacctacttctcaggcctcctggtgatcctggcctttgccgcctgggtggcgctggcggagggactgggtgtggccgtgtaygcagcggctgtgctgctgggtgctggctgtgccaccatcctcgtcacctcgctggccatgacggccgacctcatcggtccccacacgaacagcgganckttcgtgtacggctccatgagcttcttggataaggtggccaatgggctggcagtcatggccatccagagcctgcacccttgcccctcagagctctgctgcagggcctgcgtgagcttttaccactgggcgatggtggctgtgacgggcggcgtgggcgtggccgctgccctgtgtctctgtagcctcctgctgtggccgacccgcctgcgacgctgggaccgtgatgcccggccctgactcctgacagcctcctgcacctgtgcaagggaactgtggggacgcacgaggatgccccccagggccttggggaaaagcccccactgcccctcactcttctctggacccccaccctccatcctcacccagctcccgggggtggggtcgggtgagggcagcagggatgcccgccagggacttgcaaggaccccctgggttttgagggtgtcccattctcaactctaatccatcccagccctctggaggatttggggtgcccctctcggcagggaacaggaagtaggaatcccagaagggtctgggggaaccctaaccctgagctcagtccagttcacccctcacctccagcctgggggtctccagacactgccagggccccctcaggacggctggagcctggaggagacagccacggggtggtgggctgggcctggaccccaccgtggtgggcagcagggctgcccggcaggcttggtggactctgctggcagcaaataaagagatgacggcaaaaaaaaaaaaaaaaaaaaaaaaaaaaaaaaaaaaaaaaaaaaaaaaaaaaggggggggggctagttnt

SEQ ID NO: 321 - DNA, 1487 bp, Homo sapiens
  misc_feature (78)..(78): n equals a,t,g, or c
  misc_feature (948)..(948): n equals a,t,g, or c
ccgctgctgataactatggcatcccccgggcctgcaggaattcggcacggagctacggcgccgcctggctcctgctgncacctgcaggctcgtcgcgggtggagcccacccaagacatcagcatcagcgaccagctggggggccaggacgtgcccgtgttccggaacctgtccctgctggtggtgggtgtcggcgccgtgttctcactgctattccacctgggcacccgggagaggcgccggccgcatgcggasgagccaggcgagcacacccccctgttggcccctgccacggcccagcccctgctgctctggaagcactggctccgggagcsggctttctaccaggtgggcatactgtacatgaccaccaggctcatcgtgaacctgtcccagacctacatggccatgtacctcacctactcgctccacctgcccaagaagttcatcgcgaccattcccctggtgatgtacctcagcggcttcttgtcctccttcctcatgaagcccatcaacaagtgcattgggaggaacatgacctacttctcaggcctcctggtgatcctggcctttgccgcctgggtggcgctggcggagggactgggtgtggccgtgtacgcagcggctgtgctgctgggtgctggctgtgccaccatcctcgtcacctcgctggccatgacggccgacctcatcggtccccacacgaacagcggagckttcgtgtacggctccatgagcttcttggataaggtggccaatgggctggcagtcatggccatccagagcctgcacccttgcccctcagagctctgctgcagggcctgcgtgagcttttaccactgggcgatggtggctgtgacgggcggcgtgggcgtggccgctgccctgtgtctctgtagcctcctgctgtggccgacccgcctgcgacgctgatgagacctgcacgcantggctcacagcagcacgatttgtgacagcccgaggcggagaacaccgaacacccagtgaaggtgaggggatcagcacggcgcggccacccacgcacccacgcgctggaatgagactcagccacaaggaggtgcgaagctctgacccaggccacagtgcggatgcaccttgaggatgtcacgctcagtgagagacaccagacacagaagggtacgctgtgatcccacttctatgaaatgtccaggacagaccaatccacagaatcagggagaggattcgtgggtgccgggactggggagggggacctgggggtgactaggtgacataatggggacagggctgccttctgggtgatgagaatgttctggaatcagatgggatggctgcacggcgtggtgaaggtactgaacgccacctcactgtaagacggtagattttgtattttaccacaataaacaaaacaaaacaaaaccaaaaaaaaaaaaaaaaaaaaaaaaaaaaggaattcgatatcaagcttatcgataccgtcgacctcga

SEQ ID NO: 322 - DNA, 1525 bp, Homo sapiens
  misc_feature (78)..(78): n equals a,t,g, or c
ccgctgctgataactatggcatcccccgggcctgcaggaattcggcacggagctacggcgccgcctggctcctgctgncacctgcaggctcgtcgcgggtggagcccacccaagacatcagcatcagcgaccagctggggggccaggacgtgcccgtgttccggaacctgtccctgctggtggtgggtgtcggcgccgtgttctcactgctattccacctgggcacccgggagaggcgccggccgcatgcggasgagccaggcgagcacacccccctgttggcccctgccacggcccagcccctgctgctctggaagcactggctccgggagcsggctttctaccaggtgggcatactgtacatgaccaccaggctcatcgtgaacctgtcccagacctacatggccatgtacctcacctactcgctccacctgcccaagaagttcatcgcgaccattcccctggtgatgtacctcagcggcttcttgtcctccttcctcatgaagcccatcaacaagtgcattgggaggaacatgacctacttctcaggcctcctggtgatcctggcctttgccgcctgggtggcgctggcggagggactgggtgtggccgtgtacgcagcggctgtgctgctgggtgctggctgtgccaccatcctcgtcacctcgctggccatgacggccgacctcatcggtccccacacgaacagcggactktcgtgtacggctccatgagcttcttggataaggtggccaatgggctggcagtcatggccatccagagcctgcacccttgcccctcagagctctgctgcagggcctgcgtgagcttttaccactgggcgatggtggctgtgacgggcggcgtgggcgtggccgctgccctgtgtctctgtagcctcctgctgtggccgacccgcctgcgacgctgggaccgtgatgcccggccctgactcctgacagcctcctgcacctgtgcaagggaactgtggggacgcacgaggatgccccccarggccttggggaaaagcccccactgcccctcactcttctctggacccccaccctccatcctcacccagctcccgggggtggggtcgggtgagggcagcagggatgcccgccagggacttgcaaggaccccctgggttttgagggtgtcccattctcaactctaatccatcccagccctctggaggatttggggtgcccctctcggcagggaacaggaagtaggaatcccagaagggtctgggggaaccctaaccctgagctcagtccagttcacccctcacctccagcctgggggtctccagacactgccagggccccctcaggacggctggagcctggaggagacagccacggggtggtgggctgggcctggaccccaccgtggtgggcagcagggctgcccggcaggcttggtggactctgctggcagcaaataaagagatgacggcaaaaaaaaaaaaaaaaaaaaaaaaaaaaaaaaaaaaaaaaaaaaaaaaaaacccaccgtccgc

SEQ ID NO: 323 - DNA, 1050 bp, Homo sapiens
ccacgcgtccggccagccagtccgcccgtccggagcccggctcgctggggcagcatggcggggtcgccgctgctctgggggccgcgggccgggggcgtcggccttttggtgctgctgctgctcggcctgtttcggccgccccccgcgctctgcgcgcggccggtaaaggagccccgcggcctaagcgcagcgtctccgcccttggctagactggcgctcctcgccgcttccggcggtcagtgccccgaggtgaggcggcgggggcggtgcagacctggcgcgggcgctggcgcatctgctggagccgaacgtcaggagcgggcgcgggccgaggcgcagaggctgaggatcagcaggcgcgcgtcctggcgcagctgctgcgcgtctggggcgccccccgcaactctgatccggctctgggcctggacgacgaccccgacgcgcctgcagcgcagctcgctcgcgctctgctccgcgcccgccttgaccctgccgccctagcagcccagcttgtccccgcgcccgtccccgccgcggcgctccgaccccggcccccggtctacgacgacggccccgcgggcccggatgctgaggaggcaggcgacgagacacccgacgtggaccccgagctgttgaggtacttgctgggacggattcttgcgggaagcgcggactccgagggggtggcagccccgcgccgcctccgccgtgccgccgaccacgatgtgggctctgagctgccccctgagggcgtgctgggggcgctgctgcgtgtgaaacgcctagagaccccggcgccccaggtgcctgcacgccgcctcttgccaccctgagcactgcccggatcccgtgcaccctgggacccagaagtgcccccgccatcccgccaccaggactgctccccgccagcacgtccagagcaacttaccccggccagccagccctctcacccgaggatccctaccccctggccccacaataaacatgatctgaagcagcaaaaaaaaaaaaaaaaaaaaaaaaaaaaaaaaaaaaaaaaaaaaaaaaaaa

SEQ ID NO: 324 - DNA, 720 bp, Homo sapiens
  misc_feature (20)..(20): n equals a,t,g, or c
ccacgcgtccgctccgcggncgcctcgggcggaacctggagataatgggcagcacctgggggagccctggctgggtgcggctcgctctttgcctgacgggcttagtgctctcgctctacgcgctgcacgtgaaggcggcgcgcgcccgggaccgggattaccgcgcgctctgcgacgtgggcaccgccatcagctgttcgcgcgtcttctcctccaggttgcctgsggacacgctgggcctctgtmctgatgctgctgagctccctggtgtctctcgctggttctgtctacctggsctggatcctgttcttcgtgctctatgawtttctgcattgtttgtaatcaccacctatgctatcaacgtgacctgatgtggctcagtttccggaaggtccaagaaccccagggcaaggctaagaggcactgagccctcaacccaagccaggctgacctcatctgctttgctttggcatgtgagccttgcctaagggggcatatctgggtccctagaaggccctagatgtggggcttctagattaccccctcctcctgccatacccgcacatgacaatggaccaaatgtgccacacgctcgctcttttttacacccagtgcctctgactctgtccccatgggctggtctccaaagctctttccattgcccagggagggaaggttctgagcaataaagtttcttagatcaaaaaaaaaaaaaaaaaa

SEQ ID NO: 325 - DNA, 990 bp, Homo sapiens
gcatgccagtgcctactctgtgcctgctgtgggccctggcaatggtgacccggcctgcctcagcggcccccatggscggcccagaactggcacagcatgaggagctgaccctgctcttccacgggaccctgcagctgggccaggccctcaacggtgtgtacaggaccacggagggacggctgacaaaggccaggaacagcctgggtctctatggccgcacaatagaactcctggggcaggaggtcagccggggccgggatgcagcccaggaacttcgggcaagcctgttggagactcagatggaggaggatattctgcagctgcaggcagaggccacagctgaggtgctgggggaggtggcccaggcacagaaggtgctacgggacagcgtkcagcggctagaagtccagytragragcgcctggctgggccctgcctaccgagaatttgaggtcttaaaggctcacgctgacaagcaagagcccacatcctatggccctcacaggccacgtcagcggcagaggcgggagatggtggcacagcagcatcggctgcgacagatccaggagaggtgagcctggcaggggtttggcaggcagggcagttggatggggggcgcacagggcagctggaaaggggccccctcacctgggctgagccacatctccctccccagactccacacagcggcgctcccagcctgaatctgcctggatggaactgaggaccaatcatgctgcaaggaacacttccacgccccgtgaggcccctgtgcagggaggagctgcstgttcactgggaymagccagggcgccgggccccacttctgagcacagagcagagacagacgcaggcggggacaaaggcagaggatgtagtccccattggggaggggtggaggaaggacatgtaccctttcatgcctacacacccctcattaaagcagagtcgtggcatctcaaaaaaaaaaaaaaaaaaaaaaaactcgta

SEQ ID NO: 326 - DNA, 647 bp, Homo sapiens
  misc_feature (525)..(525): n equals a,t,g, or c
  misc_feature (578)..(578): n equals a,t,g, or c
  misc_feature (581)..(581): n equals a,t,g, or c
  misc_feature (620)..(620): n equals a,t,g, or c
  misc_feature (629)..(630): n equals a,t,g, or c
gtgaaacgcctgggctcaagctgattcacctgcctccacctcccacagtgctgggattacaaacatgatcccccacgcccagccaacacaaaacttctgatgctctgttttctcatctgtgaactggagctaaggctaagtggtctgtctgtttaataagagtttgaatcagatggcctggcatgaagagtcactggcctgagagaatgtcaggggcatttgtaaatgtgtaaagggctgaaaaatcctgagggattattattattgctattgttgttattattcacagacacatycaacagccattgtctgcctccttatctgtcatgctttctgcacgagcgtcagcctgagcttcaatctgtgtgtatatctgcagcttacgtccttgcacccctccagaacccagtttcatccttgtaggtttttccraagcaggatttgcacaagtggcgtgttttcttaagtatttattttgcaggccatttactcggcatggctatttttacagtgggtaaggagcanggctaaaaataacttagctcataaccagacaggttctgcatttgacattacgnggnattcatttgcatcccatttggtcgcctttctggttaacnggtagaatnnaagaaagctcacccgaa

SEQ ID NO: 327 - DNA, 1321 bp, Homo sapiens
gcgggggggaggaggagggggaggagggagcggagatctcggggctcggagccggccgccgctccgctccgatcgctgtggggcttggttttttgggggtgggggggcgggggggctcagatatggaggcaaatgggagccaaggcacctcgggcagcgccaacgactcccagcacgaccccggtaaaatgtttatcggtggactgagctggcagacctcaccagatagccttagagactattttagcaaatttggagaaattagagaatgtatggtcatgagagatcccactacgaaacgctccagaggcttcggtttcgtcacgttcgcagacccagcaagtgtagataaagtattaggtcagccccaccatgagttagattccaagacgattgaccccaaagttgcatttcctcgtcgagcgcaacccaagatggtcacaagaacaaagaaaatatttgtaggcgggttatctgcgaacacagtagtggaagatgtaaagcaatatttcgagyagtttkgcaaggtggaagatgcaatgctgatgtttgataaaactaccaacaggcacagagggtttggctttgtcacttttgagaatgaagatgttgtggagaaagtctgtgagattcatttccatgaaatcaataataaaatggtagaatgtaagaaagctcagccgaaagaagtcatgttcccacctgggacaagaggccgggcccggggactgccttacaccatggacgcgttcatgcttggcatggggatgctgggtgagtctggacaggaccgcaggtcaccatggactgggagggctatggaggcctctactcccaactgggtcacctaccagtggggcaaactgcttcacctttctaagcctcagtttccttgtctgtagatgaggatgataattccccgttccaagacagttgtgatgattaagtgtgggtgtgtgtgtgtgcatgcatgtgtgtgtgtgtgtgtgtgtgtttgtatttataatattgccccatgcctggcttataggatatgttagactattttctctcttttccatctccttcctcaaaagaaggaaaagtccccctctatctgcctcagccctctcatctgagtgggagttyttaagatgtaaggactcctggctgacttgacttgtgtgggctaaggctacgttttctaaaacttgggagaggagggaagtggtaagggtgggcgataatcctgtctatttaaatgattaacatttttctcttgggatatcaaaatttgcatttaaatggatgttttaaatagcctgttttactctttatttgc

SEQ ID NO: 328 - DNA, 729 bp, Homo sapiens
  misc_feature (725)..(725): n equals a,t,g, or c
tcgacccacgcgtccggccatttagaaataatcaactcttaatcagcctgggatagtcagtactaaaagcaccttcatgagctgtgaaaaatttaatgcatttatttacatatttagttttaaattttagtatattgttagttgaggtatagtttccaaacaaagagccgtgaaatgtttagtaactgtctctgtacctctggatgaggacagctcagccgggaatggagggggactgggtgaggagaccagaatgtcagtgtggccacgcagcacacttttgttttgtcttctgtccttgagcactggcttgttcctggataaactaggcataataatacctatcctgctgtgtgggtggaagttaaatgtgataatgatgtgtgtgagatgcctgcacagtgcctggaggtattgaagaattattgctgcctwttctttttctacctaccacttacccgctacccccgggtgctacatgttagaaaacactgtgtaaagtgtggatgcttctgaaaaatctccctgccagcagttagtgccaatagcgtgcagaaaataagatgcaatgatttggcttcttttctgtttggcaataagaagcttatttgcmcatagcctgatttctttcaatctgcaaaaaaaaaaaaaaaaaaaaaaaaaaaaaaaaaaaaaaaaaaaaaaaaaaaaaaaaaaaaaaaaaaaaaaaaaaaaaaaaaargggnggcc

SEQ ID NO: 329 - DNA, 1084 bp, Homo sapiens
ggatggcgctacgtctgctgcggagggcggcgcgcggagctgcggcggcggcgctgctgaggctgaaagcgtctctagcagctgatatccccagacttggatatagttcctcatcccatcacaagtacatcccccggagggcagtgctttatgtacctggaaatgatgaaaagaaaataaagaagattccatccctgaatgtagattgtgcagtgctcgactgtgaggatggagtggctgcaaacaaaaagaatgaagctcgactgagaattgtaaaaactcttgaagacattgatctgggccctactgaaaaatgtgtgagagtcaactcagtttccagtggtctggcggaagaagacctagagacccttttgcaatcccgggtccttccttccagcctgatgctaccaaaggtggaaagtcctgaagaaatccagtgggcagtgtgtgaagaaaccctgaaggtcgggcctcaagtaggtctctttctagatgcagtccgtttttggaggaraagactttcgagccacataggtgcamcaagtartaaagaaaccctggatawtctctacgcccggcaaaagattgttgtcatagcgaaagcctttggtctccaagccgtaratctggkgkacattgactttcgagatggarctkggctgcttagacagtcacgagaaggagccgccatgggcttcactggtaagcaggtgattcaccctaaccaaattgccgtggtccaggagcagttttctccttcccctgaaaaaattaagtgggctgaagaactgattgctgcctttaaagaacatcaacaattaggaaagggggcctttactttccaagggagtatgatcgacatgccattactgaagcaggcccagaacactgttacgcttgccacctccatcaaggaaaaatgatctgttaaatgaagctgtcatcaggctaaagggtattgaagctgcagagggatcaacttgtgcttgccagaggacgccaatgaagtttgaaacaccaacaatcagagattttgtttctgttcctcattaaatcatgagcttttgtgccgagaaaaaaaaaa

SEQ ID NO: 330 - DNA, 1776 bp, Homo sapiens
  misc_feature (1748)..(1748): n equals a,t,g, or c
agccactgtgcccagcctcggctcaggtttttmaatacagtcttgaccttggcattcagtatcctcacagcatggttctaattaactttctagctctatttcccttttcctgctccctctctctacaactagtctttctctgattgccccgccctcaacccatctaaactagaccccagggaagcaccttggtccccttcctctctcccactcaccatccaaccaatcaccagagcctgtacattctatattttcaacatcgattcaattgtctacttctttctagcctgccctctctgactgggactccttgagccagcctgatcaccccaatccatccctcacactgtgcccatctttctgaagtaggaatctgatcacaccamcctgctaaaaacactctggttctccccacggcatgtggtgcccttgtatagctggcaaagccttgcatggcacggccccagcctgtgcttcaactcaattgcccgactctctccagctctgctgagccacctaagtcacagatggtttctcctctcatctctgctctcttccatgtgccatttctgtggcttggaatgttcttccctcattctctttctggccctttcccgtcacaccttagacgtgcatcttcctctcgaaaacctctagtgaagcctcccagggccaggcagtaccctcctctggcttcttctggatacagaggaagaatctgagcatcgattctccatctcagcaggcctctgtgtgcctgctgactccgactagaccagagatccgtaaggacagggatcgagttttttttcttttaatkcactgcctcaaaaatcctctgtgcattacctattcatcctcttctctcccttaacctgaaccagtgatcttactgtctccatcattgtttttttcttttcttttcttttcttttttttttttgaggtggagtctggctcttcacccaggctggagtgcagtgatgcgatctcgactcactgcaacctccatctcctgggttcaagcgattctcctgcctcagcctccccagtagctgggattacaggcatgcgctaccatccccaactaatttttgcctccataattytgccttttstagaatgtcatacaggtggaattactcagtatgctgcctttttcagattggcttctttcacttagtaatatgstygttttttgagacagggtcttgctctgtcgcccaggctagagtgtggtggtgcgatcttagctcactgaaacctccacctcccaggttcaagtgaytctsctgcctcagcctcccgagtagctgggactacaggcacgtgccaccatacccggctaatttgtggatttttagtacagacggsgtttcgtcatgttggccagtgtgytgttgaattcctgacctcaagtgatccacctgcctcagcctcccaaagtgttgcgattacaggtgtgagccactgcgccaagcctcatttagtaataygcatttaaactttctccatgkctttaatggcttgatagctcatttatttttatcawggaatatttcattgtctggatggaccacagtttatttctccattcacctactgaaggacatctcggttgcttctaagttttggcaattatgaataaagctgctataaccatcaagtgcaggtttttgtgtggacctattatcaactaattcgggtaaatctcaaggagtgcaattgctggatccacagtaagagtgngtttagttttaagtgcttggccattttc

SEQ ID NO: 331 - DNA, 784 bp, Homo sapiens
  misc_feature (1)..(1): n equals a,t,g, or c
  misc_feature (6)..(6): n equals a,t,g, or c
  misc_feature (32)..(32): n equals a,t,g, or c
ngagtntaattgctggatcacacagtaagagngtggttagttttaagtggctgtgccattttgcattcccaccagcaatgaatgagagtttctgttgctccacattctcactaccattcggtgttgtcagtgttttgcattttggccattctagtaggtgtttacatggtatctagtcatttgaatgggcatatgatgtggaacatctttttttttttattttwttattattatactttaagttttagggtacatgtgcacaaygtgcaggttwgttacatatgtatacatgtgccatgytggtgtgctgcacccaytaactcgtcatytagcattaggtatatctccyaatgctattggaacatcttttcatgtgtttatttgccatctgtatatcttccctgatgagttggggatgcattctttccatctcagagtccccagaaactaacatagcagttggtacagagttggtgctcaacaaacatcagcttaggaactatgtcctatgtttttttgtttttttttttttttaaaaaggaatgtgagctgttcccaaaacgtatgtccttcccccatgcctctaccctgcccttccacaaactttctgatcttcagcacacactacccaaccatcaaggctgagacttcccgtggccagcagtgtctcatgctggcttcaagccccacagcactgcttttttcaacttctcttgtggtttagactgtctttagcccagcaagagaattcgatatcaagcttatcgataccgtcgacctcgag

SEQ ID NO: 332 - DNA, 699 bp, Homo sapiens
  misc_feature (12)..(12): n equals a,t,g, or c
  misc_feature (30)..(30): n equals a,t,g, or c
  misc_feature (46)..(46): n equals a,t,g, or c
  misc_feature (66)..(66): n equals a,t,g, or c
ggttcatgcttnaaccccatttgctggatnctgctttgaccctgtntccctgtactggtgttatgngaatcctggcacacattgctatcccactctgagaggmcwtgagcaaagaamccccagtrgcagaagccacattgtgctcaggtcttagttctaacaaacaccattccccattaaaaggaaccaggctccttagagaaatggatgattccagggctgtggcagggtaggtacaagatgaacctaaagtgtcgttttataccagaaagtaagaaagtattaaagtgtttaaaaaagtgatgggagcatatcacaaggattcagaagggataccaactggctaaatctggaacaatttgatcaccaaagtaagtacaataataaattctaagctattgaagtaaaggcatttattatgtgtagtaataataaatagataatgagagagaaatgaggactcatgcttacagtaaaatgccaggagctgactggcataaatgtggaaggaaggctggagtgggaaaattattattttgcaaccatcatggtaattaccagatcagataaggatcaacagatgccaaatctagggcaaatttgatgaggagcagaatatttgcactgtctttgagagtttctcccagagatcacttatttgttgtaaaaaaaaagaaaaaaaaaaaaaaaaaactcgag

SEQ ID NO: 333 - DNA, 3546 bp, Homo sapiens
ccacgcgtccgcaggtacagccaaccatgtcccagttcgaaatggacacgtatgctaagagccacgaccttatgtcaggtttctggaatgcctgctatgacatgcttatgagcagtgggcagcggcgccagtgggagcgcgcccagagtcgtcgggccttccaggagctggtgctggaacctgcgcagaggcgggcgcgcctggaggggctacgctacacggcagtgctgaagcagcaggcaacgcagcactccatggccctgctgcactggggggcgctgtggcgccagctcgccagcccatgtggggcctgggcgctgagggacactcccatcccccgctggaaactgtccagcgccgagacatattcacgcatgcgtctgaagctggtgcccaaccatcacttcgaccctcacctggaagccagcgctctccgagacaatctgggtgaggttcccctgacacccaccgaggaggcctcactgcctctggcagtgaccaaagaggccaaagtgagcaccccacccgagttgctgcaggaggaccagctcggcgaggacgagctggctgagctggagaccccgatggaggcagcagaactggatgagcagcgtgagaagctggtgctgtcggccgagtgccagctggtgacggtagtggccgtggtcccagggctgctggaggtcaccacacagaatgtatacttctacgatggcagcactgagcgcgtggaaaccgaggagggcatcggctatgatttccggcgcccactggcccagctgcgtgaggtccacctgcggcgtttcaacctgcgccgttcagcacttgagctcttctttatcgatcaggccaactacttcctcaacttcccatgcaaggtgggcacgaccccagtctcatctcctagccagactccgagaccccagcctggccccatcccaccccatacccaggtacggaaccaggtgtactcgtggctcctgcgcctacggcccccctctcaaggctacctaagcagccgctccccccaggagatgctgcgtgcctcaggccttacccagaaatgggtacagcgtgagatatccaacttcgagtacttgatgcaactcaacaccattgcggggcggacctacaatgacctgtctcagtaccctgtgttcccctgggtcctgcaggactacgtgtccccaaccctggacctcagcaacccagccgtcttccgggacctgtctaagcccatcggtgtggtgaaccccaagcatgcccagctcgtgagggagaagtatgaaagctttgaggacccagcagggaccattgacaagttccactatggcacccactactccaatgcagcaggcgtgatgcactacctcatccgcgtggagcccttcacctccctgcacgtccagctgcaaagtggccgctttgactgctccgaccggcagttccactcggtggcggcagcctggcaggcacgcctggagagccctgccgatgtgaaggagctcatcccggaattcttctactttcctgacttcctggagaaccagaacggttttgacctgggctgtctccagctgaccaacgagaaggtaggcgatgtggtgctacccccgtgggccagctctcctgaggacttcatccagcagcaccgccaggctctggagtcggagtatgtgtctgcacacctacacgagtggatcgacctcatctttggctacaagcagcgggggccagccgccgaggaggccctcaatgtcttctattactgcacctatgagggggctgtagacctggaccatgtgacagatgagcgggaacggaaggctctggagggcattatcagcaactttgggcagactccctgtcagctgctgaaggagccacatccaactcggctctcagctgaggaagcagcccatcgccttgcacgcctggacactaactcacctagcatcttccagcacctggacgaactcaaggcattcttcgcagaggttgtcagtgatggtgtacccctggtgctagccctggtcccccaccggcagccccactccttcatcacccagggttccccagacctgttggtgactgtgagtgccagtgggctgctgggcacccacagctggttgccctatgaccgcaacataagcaactacttcagcttcagcaaagaccccaccatgggcagccacaagacgcagcgactgctgagtggcccgtgggtgccaggcagtggtgtgagtggacaagcactggcagtggccccggatggaaagctgctattcagcggtggccactgggatggcagcctgcgggtgactgcactaccccgtggcaagctgttgagccagctcagctgccaccttgatgtagtaacctgccttgcactggacacctgtggcatctacctcatctcaggctcccgggacaccacgtgcatggtgtggcggctcctgcatcagggtggtctgtcagtaggcctggcaccaaagcctgtgcaggtcctgtatgggcatggggctgcagtgagctgtgtggccatcagcactgaacttgacatggctgtgtctggatctgaggatggaactgtgatcatacacactgtacgccgcggacagtttgtagcggcactacggcctctgggtgccacattccctggacctattttccacctggcattggggtccgaaggccagattgtggtacagagctcagcgtgggaacgtcctggggcccaggtcacctactccttgcacctgtattcagtcaatgggaagttgcgggcttcactgcccctggcagagcagcctacagccctgacggtgacagaggactttgtgttgctgggcaccgcccagtgcgccctgcacatcctccaactaaacacactgctcccggccgcgcctcccttgcccatgaaggtggccatccgcagcgtggccgtgaccaaggagcgcagccacgtgctggtgggcctggaggatggcaagctcatcgtggtggtcgcggggcagccctctgaggtgcgcagcagccagttcgcgcggaagctgtggcggtcctcgcggcgcatctcccaggtgtcctcgggagagacggaatacaaccctactgaggcgcgctgaacctggccagtccggctgctcgggccccgcccccggcaggcctggcccgggaggccccgcccagaagtcggcgggaacaccccggggtgggcagcccagggggtgagcggggcccaccctgcccagctcagggattggcgggcgatgttaccccctcagggattggcgggcggaagtcccgcccctcgccggctgaggggccgccctgagggccagcactggcgtctgcggccgcagcagcactttttgcacagtctggggcggggttccccggcttccaagtcgctgtttcgtcaaagcacgagggccgcctgtggccttaattcctaacggcggccccggttctcccttctcggcaataaaccaggcctagttttgtaaaaaaaaaaaaaaaaaaaaaaaaaaaaaaaaaaaaaaa

SEQ ID NO: 334 - DNA, 774 bp, Homo sapiens
  misc_feature (618)..(618): n equals a,t,g, or c
  misc_feature (715)..(715): n equals a,t,g, or c
gtctacctccgggctgaaacgtcaccatgcctccccacagacagacggatggacagatgggcctccctgcacctgctctgtgggtgtgggggctcctgctcagcagcagtttccagacccttctccctgctttccccaagccacccgccttgaatctggggtgctctaccagacccatcccctcatttctaaagatttgagccactagtcgtgtccctctccctcagaaatgccttggtgacacttggctgctttcaactcttccacccatctgcctcttggtctcatctttaccttctgctaaaggtcctgacccccacccccgccacgccatggggcaccccatggtggtgcgtccttgggagcagctctgtccctttccccgtggcctttgccccgcctcctatgacttcgattcccacctgtccccgacccctgggaccactgaccgggcccgatcaccctgtcactgccctgtcatctgcttaccccacacggtgctctgctgacccaggtcttgctgtctcccaayagccccacgaggcttyccgtcgctcctggacactrmaggctgagcccgctgccccgccgcctccatgaggaaggcttttcctctgngagccccaggccaccctttccctcctttaagtaattacttaagtcccttgccagggccctcccagtaccctttctaaagacacccctgccccagcangctgcaggctcctgctccactttcctctcaggccctcgtcgctgtggtgctgcctttga

SEQ ID NO: 335 - DNA, 1396 bp, Homo sapiens
  misc_feature (1187)..(1187): n equals a,t,g, or c
  misc_feature (1325)..(1325): n equals a,t,g, or c
  misc_feature (1327)..(1327): n equals a,t,g, or c
cctcgagccatgtgtccaggtggggcagatcatggagggcgcccaggtgcggtgctgaggctgagcatgcactggctggggagggtgggcagagcaggaggaaatcccttgttctccggagctggagagccagaaagagccctgcagcctgggcctcatcatcacacctcgccctcaaggcctccaggcacagcatccactgccagcctctgctcctgcctctgagggtctgtctccaaggtcttttgggggctgccccagctcccccaacacagacagcaccagagctgggcccacctgtgaggtgctgagttccccatctcagagactgtgcgagcagaggcagggaggcgcttgatgtcggatggagaaaggacaggggaggggtgtggggctcagggccccgccaggtgaaggaacaagcttggaagggtgtccttatgtctgagagttggggagacacccccaagccccagatggrcctcgaatgccaggcagggccaagctgggcccagaagtgggawggwtcccttggctgccccaggaatgcaggttccggggcaagaatccagccctggctggttgaagtccatcccaagtctccctccccacgaggctcctgcagatgccaggaatggggctggattccagattccaagcctggcsgcccagcccctatctgggaccccagcccagagcccccaggcctggcctccaacctggccccagcctcaggggagctgaattcagagaatcctgtcctaggagccagaagcgggggagggaggragggcggccctgtcctgggtgcaggcccgggggctgggggytgcccgcccgtctgggtcagccgcagctgcaaaccggccctggctgagtcatggsgcctccatctccagggcctggcttgaggtggggaatagcagtgaggttggacatccaggcacctgagggtgggcagggctccctgcggctggggtggccagtggcacctggctgttgcccccctgcaccccagccctttggcccccaagtctctgccacctccctggggttctgctcccatattcctcacacccagcacagaacccagcatgtctcctgtagacacctgcatataaaccctgactcacacacacacacacacacacacacacgcacacatgcaggccaggctcctcggccangtcaccctaccggcagagctctagacatttctggcctctggtgactattcttcaggcagctcaccctgcaagtctttattgagcacctactgtgtgccaggcagtggtacagcaagggcagaagccccacctccaagnanctgaacccctgccgtggcagagacagaaaacaaaggcagcaccacggcgacgagggctaaagagaacgc

SEQ ID NO: 336 - DNA, 1397 bp, Homo sapiens
tcgacccacgcgtccgctgaattgcggccgtatgcgcggctctgtggagtgcacctggggttgggggcactgtgcccccagccccctgctcctttggactctacttctgtttgcagccccatttggcctgctgggggagaagacccgccagctgcttgagtttgacagcaccaacgtgtccgatacggcagcaaagcctttgggaagaccatatcctccatactccttggccgatttctcttggaacaacatcactgattcattggatcctgccaccctgagtgccacatttcaaggccaccccatgaacgaccctaccaggacttttgccaatggcagcctggccttcagggtccaggccttttccaggtccagccgaccagcccaaccccctcgcctcctgcacacagcagacacctgtcagctagaggtggccctgattggagcctctccccggggaaaccgttccctgtttgggctggaggtagccacattgggccagggccctgactgcccctcaatgcaggagcagcactccakcgaacgatgaatatgcaccggccgtcttccagttggaccagctactgtggggctccctcccatcaggctttgcacagtggcgaccagtggcttactcccagaagccggggggccgagaatcagccctgccctgccaagcttcccctcttcatcctgccttagcatactctcttccccagtcacccattgtccgagccttctttgggtcccagaataacttctgtgccttcaatctgacgttcggggcttccacaggccctggctattgggaccaacactacctcagctggtcgatgctcctgggtgtgggcttccctccagtggacggcttgtccccactagtcctgggcatcatggcagtggccctgggtgccccagggctcatgctgctagggggcggcttggttctgctgctgcaccacaagaagtactcagagtaccagtccataaattaaggcccgctctctggagggaaggacattactgaacctgtcttgctgtgcctcgaaactctggaggttggagcatcaagttccagccggccccttcactcccccatcttgcttttctgtggaacctcagaggccagcctcgacttcctggagacccccaggtggggcttccttcatactttgttgggggactttggaggcgggcaggggacagggctattgataaggtccccttggtgttgccttcttgcatctccacacatttcccttggatgggacttgcaggcctaaatgagaggcattctgactggttggctgccctggaaggcaagaaaatagatttattttttttcamaaaaaaaaaaaaaaaaaaaaaaaaaaaaaaaaaaaaaaaagggcggccgc

SEQ ID NO: 337 - DNA, 1368 bp, Homo sapiens
ctgaattgcggccgtatgcgcggctctgtggagtgcacctggggttgggggcactgtgcccccagccccctgctcctttggactctacttctgtttgcagccccatttggcctgctgggggagaagacccgccagctgcttgagtttgacagcaccaacgtgtccgatacggcagcaaagcctttgggaagaccatatcctccatactccttggccgatttctcttggaacaacatcactgattcattggatcctgccaccctgagtgccacatttcaaggccaccccatgaacgaccctaccaggacttttgccaatggcagcctggccttcaggtccaggccttttccaggtccagccgaccagcccaaccccctcgcctcctgcacacagcagacacctgtcagctagaggtggccctgattggagcctctccccggggaaaccgttccctgtttgggctggaggtagccacattgggccagggccctgactgcccctcaatgcaggagcagcactccatcgacgatgaatatgcaccggccgtcttccagttggaccagctactgtggggctccctcccatcaggctttgcacagtggcgaccagtggcttactcccagaagccggggggccgagaatcagccctgccctgccaagcttcccctcttcatcctgccttagcatactctcttccccagtcacccattgtccgagccttctttgggtcccagaataacttctgtgccttcaatctgacgttcggggcttccacaggccctggctattgggaccaacactacctcagctggtcgatgctcctgggtttgggcttccctccagtggacggcttgtccccattagtcctgggcatcatggcagtggcctgggtgccccagggctcatgctgctagggggcggcttggttctgctgctgcaccacaagaagtactcagagtaccagtccataaattaaggcccgctctctggagggaaggacattactgaacctgtcttgctgtgcctcgaaactctggaggttggagcatcaagttccagccggccccttcactcccccatcttgcttttctgtggaacctcagaggccagcctcgacttcctggagacccccaggtggggcttccttcatactttgttgggggactttggaggcgggcaggggacagggctattgataaggtccccttggtgttgccttcttgcatctccacacatttcccttggatgggacttgcaggcctaaatgagaggcattctgactggttggctgccctggaaggcaagaaaatagatttattttttttcaaaaaaaaaaaaaaaaaaaaaaaaaaaaaaaaaaaaaaaaaa

SEQ ID NO: 338 - DNA, 1763 bp, Homo sapiens
ccacgcgtccgattcaagtgatcaagattttaaaatatgaaaagaaactggccaaaatgtgctttttaatgatattcaccttcctggtctgttggatgccttatatcgtgatctgcttcttggtggttaatggtcatggtcacctggtcactccaacaatatctattgtttcgtacctctttgctaaatcgaacactgtatacaatccagtgatttatgtcttcatgatcagaaagtttcgaagatcccttttgcagcttctgtgcctccgactgctgaggtgccagaggcctgctaaagacctaccagcagctggaagtgaaatgcagatcagacccattgtgatgtcacagaaagatggggacaggccaaagaaaagtgactttcaactcttcttccatcatttttatcatcaccagtgatgaatcactgtcagttgacgacagcgacaaaaccaatgggtccaaagttgatgtaatccaagttcgtcctttgtaggaatgaagaatggcaacgaaagatggggccttaaattggatgccacttttggactttcatcataagaagtgtctggaatacccgttctatgtaatatcaacagaaccttgtggtccagcaggaaatccgaattgcccatatgctcttgggcctcaggaagaggttgaacaaaaacaaattcttttaattcaacgggtgctttacataatgaaaaaaccacttgtggcacacgatgggcatctaacatcatcatcttctaatgtgttggagattttcatttcaaatatattttttaaattactctattttccaaaacacgtaatgcatttttctcgaaaataccttactgtaaaaataactgtcgcgtacacatgtgtgaagtagctagaacatactgaatttttttttgtactgttggactctattcagtgtcatgtcctatatctgatcaagttatcaaggagataattctagaatgaaaaagaaaatcctcttgttggaaacaaaagacgttttatatgtgcagtatgacaaagaggagtttcagagacaactttgaatccttgtcagcctggagaccagcaccagaggaatctacaaggcaaactcccatatatttgcttcccccaaattgctgcccctacagactcaaagctctttttctttgttttgttgtttctctaaaaatttactgttctttgtcgatgctatataagccagggagttctaagacgccagctctttgagatttgctcattcccctgtatttcccacatatatattacatatacccgctaataaatttatgtttgtttttctcttgtcaatctgtcttttgttataggggccccagccaaggaacctaaagtgggtagaaggaaaaattattttttctttccctacaaactgaacatggattattagaactcaaggttttcattgacaatatagaaaagaaacactgaatcattttattttattgcccaatttttatttcttatatgactctagtgtttcatcttcataattaatcatgtttgaaggatttctgagtgactcagcagcctgttaaagaaggatgaaccaaagaaaacatttcactaaatgtgcttttaaaaatcaagtgtattgctggttctgctgcagtatgtagtcgaagaataaattagtaaattgcttctgagggtctgaaattgaataaagtaatggctttgtatttctataaaaaaaaaaaaaaaaaaaaaaaaaaaaaaaaaaaaaaaaaa

SEQ ID NO: 339 - DNA, 1274 bp, Homo sapiens
gcccacgcgtccgctgttgctcaaaggaaataggagttggtgtgcttgtgaccaaggggttacacttmcagcttttaaaattctcctttacatgtgctcagtgttttgktttgtgttttggtttctgttttttattttaattcccacattgggcacaagaatcagaatatggatagctagtttaagaaacttttgtgggtgcactgtagcatagatgacagaatttgatgttccccccatctccaattcagttcagggcattccacagttaaacagaaatgggaacgtggggctcttataaatgaatgggcgctcacagttttggttttcagctcttcatgtctgtaagtgtgctttggggraggctatgtctgtatggtcgattctcagttatcacatttgcctctcctcccactaccttcatgamcattcagtgctgttcgcactgcagttagagagaagggacggacagttggtgacactcagccacattgctacttttatctgttctggtaagaagttagatagatggtagattgaagcaattgggtagaattagttgggggaatatttatgagttgctgtgtttgttgattagttccatctctttcccattttaactgagaattgattatatatagctctaagtatataggtatttaaacaaccccacaagcggctgtatcagtaacatttattaattccactatagtgagggaggatttccattctaaataccttattttgagggatttataaaacttagttgtaaaagagaaagcccacatagtgggaataaattgcttcagccatttttagtatttgagagcactagggaagatgtttagtagctgtgtggatgccttttttcacaccctgtctattgaatgctgcatccattcacgaagttaaatgttacatgcagttagtccttaatgtggactggatctgtacttttgttttggattaaaacatttaaagatttttgaagtgcagctactccccacgtgcatttgmtacacataaaagtcatactgtgtgtgcacaaagagtacatggattttccagcataytgctttaaaaaattatataaactgttaaaatattaacacctcaggctacctgctgtattctgtcccattgacccctggaattggatttactgcaagtgattgataattcaattatgtggcttttcccctttaatcttgccatttaaattacagtagaaagacaaaatcaagtaaaataaagtgttagataatagaaagagt

SEQ ID NO: 340 - DNA, 847 bp, Homo sapiens
  misc_feature (20)..(20): n equals a,t,g, or c
  misc_feature (24)..(24): n equals a,t,g, or c
  misc_feature (37)..(37): n equals a,t,g, or c
  misc_feature (49)..(49): n equals a,t,g, or c
  misc_feature (96)..(96): n equals a,t,g, or c
  misc_feature (116)..(116): n equals a,t,g, or c
  misc_feature (193)..(193): n equals a,t,g, or c
  misc_feature (199)..(199): n equals a,t,g, or c
gcttaacttccaagttgggntaanttgcccaaattcnaggaccccaatnttaattgcccaaagagggagccaataccttgaagaacccaagtgttnactgcttgcagttacccgtnttaaacccggagaaccctgtgcggaatcctgaacctgcgctgtctgggtggccacacagagcccgtggtgctgccgntcatcnacagctgccagtgcagctcctgccaggggacggggtttcgccatgttgcccaggctgttcttgaactcctgggctcgagtgatccacctgcctcagcctcccaatgcgctggggttacaggcaggaaccactgcacccagccccctgacctcatcttttaagcaaggctgacattgctatgcaggcttgttgggtggacttggtgagggcacgcgtgtgaagtggctggcaggtgcctagttctgttaagcacctgccatatgataacctgaggtcccactgtgtggcagatgaaggggaaacagaggtggaaggcacccgtgccacctgggtggagcacagtggaaggcctggtgttggctctgggcgtcctcctggcaccagcctgaccactctgcctctcttactaacccatctctccctcacgtgtcccctgggaggtgacttctcaaagcgctaacaggctccgctgggtgagtccacagctgtccctcttgtgatcatgggactcagcagcactgaccacgtccttccacgctctctcacctgcccccaactgggggcccatgacttggcattagcatgttccaaataaagtgatactggcaacaaaaaaaaaaaaaaaaaaaaaactcgagggggggcccg

SEQ ID NO: 341 - DNA, 2409 bp, Homo sapiens
ccacgcgtccgcttcgacgacgacacctgcagaagtgcggacccgccatgccgcgccacctctcgggactgctcctgctgctctggccgctgctgctgctgctgccgccgacccccgccgcccccggccccctggcccgcccgggtttgcggaggctgggcacgcggggcccagggggcagtcccgggcgccgccctggctctgctgtccccacccgcgcgccctattccggggccggccagcccggcggggcccgaggcgcaggtgtttgcaggagcaggcccttggatttggtgttcatcatcgatagttcccgcagtgtgcggcccctggagttcaccaaagtgaagacctttgtctcccagataattgacactctggacattggggcggcagatacacgggtggcagtggtgaactatgctagcaccgtgaagattgagttccatctccagacccactcagataaacagtccttgaaacaggctgtggctcggatcacacccctgtctacaggcaccatgtccggcctggctatccagacagcaatggatgaggccttcacggtggaggcaggagctcgggggcccacttccaacatccctaaggtggccatcatcgtgacagatgggaggccccaggaccaggtgaatgaggtggcggctcgggcccgggcatctggtattgaactctacgccgtgggcgtggaccgggcagacatggagtccctcaagatgatggccagcgagcccctagacgagcacgttttctatgtggagacctacggggtcattgagaaactctcctctagattccaggaaaccttttgcgctctggacccgtgtgtgcttggcacacaccggtgccagcacgtgtgtgtcagtgatggggaaggcaagcaccactgtgagtgcagccaaggctactccttgaacgccgatcagaagacgtgttcagctatcgataagtgtgctctgaacactcacggttgtgaacacatctgtgtgaacgacagaactggctcttaccactgtgagtgctacgaaggttacaccctgaaccaagacaggaagacttgttcggctcaagaccaatgtgcctttggtacacatggctgccagcacatttgtgtaaatgacagagatgggtcccatcactgtgaatgctacgagggttatactctgaatgctgacaacaaaacgtgttcagttcgcagcgagtgtgctgggggctcgcacggctgccagcacctgtgtgtggacgacgggcccgcggcctatcactgcgattgtttccccggctacaccctgaccgaagaccggaggacgtgcgcagccattgaagaagcacgaagactcgtctctacagaagatgcttgtgggtgtgaagccaccctggccttccaggagagggccagctcatatctgcagagactgaatgccaaactcgatgatattttgggcaagttgcaagcagatgcgtatggacaaatacatcgttgaattactcagatttttcacctggatatacggagagcttggtctatttaatatttttgcatacttcaatgttcctgctaataatttgccattgcaaatgctttaatattactggataagtagtatgaggatcttctagagaatcagtaggacataaacgttcacatccttaagagcaaactttagtgtctctaagctatgactgtgaaatgattcatggggaatagaatgaaaagtttggtatctctttatttaccaattgagccatttaatttttaaatgtttatattagtaagataaccattcttacaatgggaactttttatctattttctcttgatagtatttatagtataaaccagttttattattgagagtgtaaattatacaagtatttacacataaaaaagttcatataattgaggtaaatataatttagaactgtttctttaatgctttgttttttgctcactttttgctggaatatcactgaagctgtgatcaggggattataacacatatcaagatcaagtgaacactacatgaaatattgtaagaaacacataactaaagactttagttttgaattaagtgttataacttcttaccaagttttggtaaaaaatcctacattatctttactgtttcactttaggattcaatcaagaaaattatatacttataaatattgatctaaaaagttaacaacaaacccaatgtcgccattttaaagtttaagcttaacttttcttcacttacatatttagtatatgtattttatttttccgcttgaaagcttatagctcttaggagaaaaccatcctttaaattgtgactactcattttttctgtttgtattgtctttagtataataaaaagttactatctttataaaaaaaaaaaaaaaaaa

SEQ ID NO: 342 - DNA, 876 bp, Homo sapiens
caggtaccggtccggaattcccgggtcgacccacgcgtccgcttcgacgacgacacctgcaraagtgcggacccgccatgccgcgccacctctcgggactgctcctgctgctctggccgctgctgctgctgctgccgccgacccccgccgcccccggccccctggcccgcccgggtttgcggaggctgggcacgcggggcccagggggywktcccgkkcgccgccctgkctctgctgtccccacccgcgcgccctattccggggccggccagcccggcggkgcccgaggcgcaggtgtttgcaggagcaggcccttggatttggtgttcatcatcgatagttcccgcagtgtgcggcccctggagttcaccaaagtgaagacctttgtctcccagataattgacactctggacattggggcggcagatacacgggtggcagtggtgaactatgctagcaccgtgaagattgarttccawctccagacccactcagataaacagtccttgaaacaggctgtggctcggatcacacccctgtctacaggcaccatgtccggcctggctatccagacagcaatggatgargccttcacggtggaggcaggagctcgggggcccacttycaacatccctaaggtggccatcatcgtgacagatgggaggccccaggaccaggtgaatgargtggcggctcgggcccgggcatctggtattgaactctacgccgtgggcgtggaccsggcaracatggagtcccttcaagatgaatggccagcgaagcccctagacgagcacgttttctatgtggagacctacggggtyattgagaaaccttcctytagattccaggaaacccttttgcgctcttggaacc

SEQ ID NO: 343 - DNA, 1586 bp, Homo sapiens
tttattatactaaagmcaatacaamcagaaaaaatgagtagtcacaatttaaaggatggttttctcctaagagctataagctttcaagcggaaaaataaaatacatatactaaatatgtaagtgaagaaaagttaagcttaaactttaaaatggcgacattgggtttgttgttaactttttagatcaatatttataagtatataattttcttgattgaatcctaaagtgaaacagtaaagataatgtaggattttttaccaaaacttggtaagaagttataacacttaattcaaaactaaagtctttagttatgtgtttcttacaatatttcatgtagtgttcacttgatcttgatatgtgttataatcccctgatcacagcttcagtgatattccagcaaaaagtgagcaaaaarcaaagcattaaagaaacagttctaaattatatttacctcaattatatgaacttttttatgtgtaaatacttgtataatttacactctcaataataaaactggtttatactataaatactatcaagagaaaatagataaaaagttcccattgtaagaatggttatcttactaatataaacatttaaaaattaaatggctcaattggtaaataaagagataccaaacttttcattctattccccatgaatcatttcacagtcatagcttagagacactaaagtttgctcttaaggatgtgaacgtttatgtcctactgattctctagaagatcctcatactacttatccagtaatattaaagcatttgcaatggcaaattattagcaggaacattgaagtatgcaaaaatattaaatagaccaagctctccgtatatccaggtgaaaaatctgagtaattcaacgatgtatttgtccatacgcatctgcttgcaacttgcccaaaatatcatcgagtttggcattcagtctctgcagatatgagctggccctctcctggaaggccagggtggcttcacacccacaagcatcttctgtagagacgagtcttcgtgcttcttcaatggctgcgcacgtcctccggtcttcggtcagggtgtagccggggaaacaatcgcagygataggccgcgggcccgtcgtccacacacaggtgctggcagccgtgcgagccmmcagcacactcgctgcgaactgaacacgttttgttgtcagcattcagagtrkaassctcgtagmatwmacagtgatgggacccatctctgtcatttacacaaatgtgctggcagmcatgtgtaccaaaggcacattggtcttgagccgaacaagtcttcctgtcttggttcagggtgtaaccttcgtagcactcacagtggtaagagccagttctgtcgttcacacagatgtgttcacaaccgtgagtgttcagagcacacttatcgatagctgaacacgtcttctgatcggcgttcaaggagtagccttggctgcactcacagtggtgcttgccttccccatcactgacacmcacgtgctggcaccggtgtgtgccaarcacacacgggwccagagcgcaaaaggtttcctggaatctagaggagagtttggcaattt

SEQ ID NO: 344 - DNA, 1011 bp, Homo sapiens
  misc_feature (2)..(2): n equals a,t,g, or c
cnccctttttttttttttttttttttttttttttttttttttttttttttttttttttttttgcagcttaaaagcattttattaagcatttttggatgttgcttcctaccacttaagaataaaaaatgcattttaataaaaacaaatctatactgaagtcattttcctttgtgagaggaaatatgaatgaaatacattcatacttaaaaacagagtattttactgccaaaactttaaatatctcaagagcataccacattttaaacacattatggtcatgtagctatttcaatattcctgggagtggtgggcaattagcctgtctatggcttaggatctgtttccatgcttgcttcctgagcttcttctacctctgagagtttttcatcattttccaatgtttgctgaagttcatggatggtactaagaagaacatgaaactgtttccgtctcaattccagcttatcttcaacactttctttaatgtgtgaaagatgctctaattcttttcccagagcctctagttcctttaatgtctcatgcctgtctggatggtgctgaatcacttttgccaaagcatcatattcttggcgattttttcgtattcgttttgcttgaagaatttgctttttgcactcagcaattttttcatgtgctccagctatgctacattctatttccttgtaaattttttcataattttccatttctctgagattcatatcatatactagtaaagttttgcccattgaaaattcacattgagacagcgtgctcagcatacgttggtactggctatatccctcttcctgggacccagagttgcaccatttaatgaaactcttcactagcagattaattctccgatcatctccagcaccatctccatcaatgaggagacgcttccgtataattcgtcgtcagtcacggctcccatggcgtgcgcggcggcggcggcgggcaagctgaggcggcggttggcggcggcggcggaggtcaaactcccacaat

SEQ ID NO: 345 - DNA, 1063 bp, Homo sapiens
  misc_feature (23)..(23): n equals a,t,g, or c
  misc_feature (27)..(27): n equals a,t,g, or c
  misc_feature (30)..(30): n equals a,t,g, or c
  misc_feature (1032)..(1032): n equals a,t,g, or c
  misc_feature (1055)..(1056): n equals a,t,g, or c
  misc_feature (1062)..(1062): n equals a,t,g, or c
gttggggggttatgccctttcgntccnttnaaatcgagtcactgatsatgtaatgatatattttttcattattatagtagaatatttttatggcaagatatttgtggtcttgatcatacctattaaaataatgccaaacaccaaatatgaattttatgatgtacactttgtgcttggcattaaaagaaaaaaacacacatcctggaagtctgtaagttgttttttgttactgtaggtcttcaaagttaagagtgtaagtgaaaaatctggaggagaggataatttccactgtgtggaatgtgaatagttaaatgaaaagttatggttatttaatgtaattattacttcaaatcctttggtcactgtgatttcaagcatgttttctttttctcctttatatgactttctctgagttgggcaaagaagaagctgacacaccgtatgttgttagagtcttttatctggtcaggggaaacaaaatcttgacccagctgaacatgtcttcctgagtcagtgcctgaatctttattttttaaattgaatgttccttaaaggttaacatttctaaagcaatattaagaaagactttaaatgttattttggaagacttacgatgcatgtatacaaacgaatagcagataatgatgactagttcacacataaagtccttttaaggagaaaatctaaaatgaaaagtggataaacagaacatttataagtgatcagttaatgcctaagagtgaaagtagttctattgacattcctcaagatatttaatatcaactgcattatgtattatgtctgcttaaatcatttaaaaacggcaaagaattatatagactatgaggtaccttgctgtgtaggaggatgaaaggggagttgatagtctcataaaactaatttggcttcaagtttcatgaatctgtaactagaatttaattttcaccccaataatgttctatatagcctttgctaaagagcaactaataaattaaacctattctttcaaaaaaaaaaaaaagggggggcccnttttaaaggatccaagtttaccnnccccgng

SEQ ID NO: 346 - DNA, 1178 bp, Homo sapiens
  misc_feature (3)..(3): n equals a,t,g, or c
  misc_feature (41)..(41): n equals a,t,g, or c
tcnccccaataatgttctatatagcctttgctaaagagcanctaataaattaaacctattctttctgtgtgtgtgagcgtgcgtttgtgtttggtagtgttcctagggcagaggtggagcagggatgcacttatcatgggaagggaggtagaaaagagaattggatagcctgtgatctttggtggaatttattccttttgcctaggcctttcagaccctgcttgatttccgtaggacacttcaggttgtggcaagggagagctggtctgcaatcggaagtaccagcctcttccctagagcacaactagaaagaagaactatagagtgttataagggaggccctgagatggaaggaccatcacacagaaatgataataacttcatttcagggtgttccaggggaaaagcaggagaaagatttggggctcagtagaaggaaaagcttcctagtgataagagtgattggcaataccatgaggtacctttaaaagatagtgaactcctgtccttggaaatattaaaccacaggctagatatcatttaatagggatgtgaagtagagtaagtcactgcccttggtgtgcaattgtgaacttgtcaatttctgaggtccctttctacttagatatataatacaagatttctattaggtatgggtgctctgatgataatgaaaatcccagcagytatgtatgggatggttacaccagacactgtgctaaggattttctttgaattgtttctcactcaatcttcacggtagctcagtgaggtaggtaccattatcactgstagaaagcagtgaacttatatggtcttactgtggcactgggtccttaaacattatgcaaaactgtgagcaacttttatcggtttgttcttttaagaacataacacagcactctaaaaatagatctaactagattgttcacatctagcgattaaggccaccctgagattatagctgcatcatcaggracccaagatctgaagcattcagtcaaagcctcttggccacctctctttttgtcatggccttcttggacttggagggggagaatggaagcaagtaccaaggagaaagtgttctcagaaaagccacacccattagaaaaatacaaggccagtcgacgcggccgcgaattcccgggtcgacgagctcactagtcggcggccgc

SEQ ID NO: 347 - DNA, 585 bp, Homo sapiens
  misc_feature (570)..(570): n equals a,t,g, or c
gcttcctgcacctggtgacgcttggcgaaactgaggtctcatggagaagccccggagtattgaggagaccccatcttcagaaccaatggaggaagaggaagatgacgacttggagctgtttggtggctatgatagtttccggagttataacagcagtgtgggcagtgagagcagctcctatctggaggagtcaagtgaagcagaaaatgaggatcgggaagcaggggaactgccgacctccccgctgcatttgctcagccctgggactcctcgctccttggatggcagtggttctgagccagctgtctgtgagatgtgtggtatcgtgggtacaagggaagccttcttctccaagaccaagaggttctgcagcgtctcctgctccaggagctactcctccaactccaagaaagccagtatcttggctaggttacagggaaaaccaccgaccaaaaaagccaaagtcctkcacaaggtgcctggtctkccaaaattggagccttcctccaatctcaaaggacaggacagctggcaratkggacaccaacaggacaagacgctctggtcttnggcttcgactggggg

SEQ ID NO: 348 - DNA, 4344 bp, Homo sapiens
  misc_feature (754)..(754): n equals a,t,g, or c
  misc_feature (2242)..(2242): n equals a,t,g, or c
tgagaatccttgtggctttgattcggagtgtctgaacaggatgctgatgtttgagtgccacccgcagtgtgtcccgcgggcragttctgccagaaccagtgcttcaccaagcgccagtacccagagaccaagatcatcaagacagatggcaaagggtggggcctggtcgccaagagggacatcagaaagggagaatttgttaacgagtacgttggggagctgatcgacgaggaggagtgcatggcgagaatcaagcacgcacacgagaacgacatcacccacttctacatgctcactatagacaaggaccgtataatagacgctggccccaaaggaaactactctcgatttatgaatcacagctgccagcccaactgtgagaccctcaagtggacagtgaatggggacactcgtgtgggcctgtttgccgtctgtgacattcctgcagggacggagctgayttttaactacaacctcgattgtctgggcaatgaaaaaacggtctgccggtgtggagcctccaattgcagtggattcctcggggatagaccaaagacctcgacgaccctttcatcagaggaaaagggcaaaaagaccaagaagaaaacgargcggcgcagagcaaaaggggaagggaagaggcagtcagaggacgagtgcttccgctgcggtgatggcgggcagctggtgctgtgtgaccgcaagttctgcaccaaggcctaccacctgtcctgcctgggccttggcaagcggnccttcgggaagtgggaatgtccttggcatcattgtgacgtgtgtggcaaaccttcgacttcattttgccacctctgccccaattcgttctgtaaggagcaccaggacgggacagccttcagctgcaccccggacgggcggtcctactgctgtgagcatgacttaggggcggcatcggtcagaagcaccaagactgagaagccccccccagagccagggaagccgaaggggaagaggcggcggcggaggggctggcggagagtcacagagggcaaatagcgccaggcggccgcttggccggatccaggggcggtgcagggcggccggccctgcctgcgggagagggcgagcatgaactggcccggaggacccagctcgagccgccaggacacagacgtacaggcctcctcgggagggagcgcctccccaccactgagccatcctcagcagcgtccgctgcgtctgcactgatgaccgtctgagcccagctcagcgttcctggacaaacagcctcactcctcagcgttaccgccacacttgaatttctccgaatgtcaaggttccctcccactctatttttttaggttaaagttaattggcatatggaatgttttaatctcctctgaaatgtgtagcgtaggcttttcccaagggtcgctagaaactcgtcttcgcgttgccccctttctggctctcagcgccgtcgccactcgggagaggctgggtgaggcccgtgtgaggactgaccctggattcctcgaaactgccattgtgatcattactctgctctttggaaatggctgtatcatttttttgtactaatgtgaattgttcctcagaaacgcttcttttccatcctagtgagaagctggccctgcaggtggtggcagcaatggtgttgtaagatttcctcccgtagttttttctcctcatggatttgaatgaaatgccaataacacgtccactttcaacgtgtagtttacgcggagcactttcgaggcctggccgggttgggcctacttctcacctgggcctatcttctgaactcgctaggttcttatcaacatttgggggataactttgtatatttttttcatttggcttttctttaccagtttctgatttttattctcaatatatttttgctaaacctatttcacaaatcaccaccgactgaagtgtgtgtttactgatgcggccctgagctccatggcgaaaggagtgactttgcagggcgtgagaccgcagtctgcttagagcacaggaagtgacaacttagggagccccgtagggcgctgcaggccccggggaccccagcacgtgggtctaaagagagacggagtctagctctcctgccacccagagtggcttccatctcagcactctgtgggtctggtgatggaagatgcagtctctgctgatcacatgtgccctctgccagggcacctactgagaggtgcggtcctgggggtggaggcctgcctggcangtgtgsgtgcctcgtacgtgtgttatgggcactggtctaggccaggtatgacacccactctyctgtgagatttcactttagtttttaaaaggtccagttctacagagtgagacctatctatctgagtactacatatgttttaagacttggttctttttttgagggatccttgaccctgggaagtctggagcaccctgagaagggggcaccatgtgtgcctttgcccacgtgtcctgaggggctgcttgtctgggagggagggagagaacattcagcagcaggtgcttttttatggccttttcttaaaataacctaagggggacacatccatcttgcagagaagtttacagaactccccttgaaaactgctgctgaggctcctgttaaattttctgtggcatcttttatgccttggtaaaaactgcagtgtctttggacctgagagtggctactccgtggttttgtgacctgtaagcgtggggttcaggggtgtgtggccctgcagggtcccacgcctccctgagcactgactggaagtttcactggctggtggctgtcccttctcccatcagggtccccagcaaagttaactacacagaggacccaggggaaacgagctgtgtagccactgacttgctcgcgcggccgtggcctctgaggggcactcgccggttaagacagggtgggagtagtgctttccagttcagactctaacttctcccaaagtgtcctaagaaaatactggatcggctcatagatttatgctccttatgatgccctaacttggaaggttgttctagggacaggccgggcagtgtccccacacacaccttagagtcgaaggccccagggccccgctgtcacttgcccaaaagatcccttccggcaggtaagggactaccaatgcttacgtcaaaacagcagaatcggctttgcagtgcactttggggagcagatattaacttatttttgtgttggacagtagtgaaatcttgtgatttttaatcgctttgataatacttccaaattttatgatttttctgaaggaaataatgcaaacattttaaatatgtttctccccctttccaaaaactgttaaactaatgagcaagtaacactaactttgaatgtctctacaatacccgttgataactcagtggagccaggctttggggtagcggccctgagcttgcagggtttctcgccactggggctgaccacgcccccagctgtgaccgtgggtgtggctggctctcggccctgcccagctttgttctgaggacgtggtgacttcctgaacatcagcttcaatcctccatcattaatgtgaagcaaaacacaaaaaccgccccaatccctcaggattccttggcatccgaaaccagcatctgcacctaaacccatacccacccgtgtgcgcccacagggggatgtgtccgaatgggcagcttaaaatgtggtcacctgtgggggaaactcttcaggcacctgaagtgagaacccagctgtccgtcctcaggccggcctttcttccggcgacacccgtccatggctggctgggtccccttcgcagtgtttgtctgtcttgacatctaaaccccggcgtgtgcagtgcccatcttccaggactaccttattttccagaattaaacctgttttataattcaagttaatgcaaatgactgtcagttgccaaatatcttgatcctatgagtgtagttgatgactgtttgttagtcagtagagtaaaatgctgtgtccacggggtgtcacagcctcaccataccctgttgaggtgtgaaatgccccgtcagaaattaaatacaaacttaaatgtgcctattggtgtctaaacttcatacaatgtaaggtcagattccttttaggaatactgggtgctgtcaccaggtttgatagttagacttaaaaacttgaaattcactttttggggggagggatatactgaaatagagagttgagacttgccagttgggggaaaatagcatttaaaatggaaagctgtgtttggaaaattgtgtatgagtatttttgtattaaaaacattttaaaggcttttttcttaaaaaaaaaaaaaaaaaaaa

SEQ ID NO: 349 - DNA, 1258 bp, Homo sapiens
aaccctcactaaagggaacaaaagctggagctccaccgcggtggcggccgctggctgaccggcctaaaactaaaatgacatttattccctagctacaaacatcagcgttattatgttaattataccttgccctctatcattataaatggttgccatggtgtttctaaaaataagtgttttaccattaatgtgtagagggcaaacaaagcataaagtactaagggatcatgcttatcctagggtctcacagaagagaggacatatttaattaatcttgtgaattacagaacaggttgtggtccagacaccaagaatcataggggtttttttttaaaaaacctaatagaagtagggtgacctctctctttggtctaagagttctaaaggaaggtaggcatctgtttaattagttggttcaccctggctttacctctggttaatgcttgtgttaataggaaggaaaaatcactttatcttttcttccaagcccctccctgcctgacttacccagactgggattaccagataccaggtgatttatgtggagatgatttttcacctttaaactctaagccaagtgtaagaaactcttgatagctatgtctattttatatcagtcactgagacttttttttaagtttttatttattattaagacaactttgccaaaaaagtcccctaagcacaactatttacatttctttatagcctcttctgatctctaacacatatgcagttttaactgttattttcatagtaactgatcttttgtctaaggatttttacctgaaagcacaatgtattgagtctcttgaaaatcatctttcagatctttttacagaatgaacttatgcactgctactgtagtattctcaaggaatatatgtaaacacaaatgtatgcctgaggttggtttttgcagaaaacagtctctgcttctaaaaacttctatgtctagtcttccataggaaatcctcactgtttaaccatgtgaggagcctaagtcattaaacggatcatgtctgtacattgtgtaatgaatgaaaagcacataaatgtaatctactttgaactttgtaaaaatgatgtgtggaggctattcttgtttctccatctcaagtcctgtgtgtgcacgtgtgtgcaagtgcacatgtgtgtgtgtaataacacattgtaaagaacagaaattactttaaaaaataaacagaaatggagacctgaaaaaaaaaaaaaaaaaaaaaaaaaaaaaaaaaaaaaa

SEQ ID NO: 350 - DNA, 1739 bp, Homo sapiens
ggcacgagagatcctcaggatatctttagccaaaggaaaagctccgcattcccacctggggggaaagctggattgccatgggcacgaatagtggtgcagagtccctggccatcctgaatatccagaatggtgtttctgaagttcttctgcatgagtttcttctgccacctgtgtcaaggctacttcgatggccccctctacccagagatgtccaatgggactctgcaccactacttcgtgcccgatggggactatgaggagaacgatgaccccgagaagtgccagctgctcttcagggtgagtgaccacaggcgctgctcccagggggaggggagccaggttggcagcctgctgagcctcaccctgcgggaggagttcaccgtgctgggccaccaggtggaaggatgctgggcgcgtgctggagggcatcagcaaaagcatctcctacgacctagacggggaagagagctatggcaagtacctgcggcgggagtcccaccagatcgggggatgcctactccaactcggacaaatccctcactgagctggagagcaagttcaagcagggccaggaacaggacagccggcaggagagcaggctcaacgaggactttctgggaatgctggtccacaccaggtccctgctgaaggagacactggacatctctgtggggctcagggacaaatacgagctgctggccctcaccattaggaccatgggacccgactagtcggctgaaaaatgattatcttaaagtataggtggaaggatacaaatgcttagaaagagggaatcaaatcagccccgttttggaaggtgggggacagaaaatggggctacatttcccccatacctactatttttttatatcccgatttgcactttgagaatacatctaaggtcatctttcaaaagagaaaaattggacacttgagtgactttgtttttagttttgtttttgaacattatttatgtgattgttatggaattgtcacctggaaagaacaattttaagcaatgtcatttctagatgggtttctaattctgcagagacacccgtttcagccacatctaaaagagcacagtttatgtggtgcggaattaaacttccccatcctgcagattatgtggaaatacccaaagataatagtgcatagctcctttcagcctctagccttcactcctgggctccaaaagctatcccagttgcctgtttttcaaatgaggttcaaggtgctgctttgcatgcctgccaacccatggaagttgtttcttacttcttttctctcttatttattaaccatggtctgagagttgtttttgttctatgtaacagtattgccacaaaactataggcaaatcgtgtttgcagggagatttctgatgcctctgtgggtgtgtgtaagttaaagtggccacatttaagaaggccaagctttgtagtggttgcacagtcacactgatatgctgatttgctctttctcattgtatgtctatgctttgtcatcagtgctatagtaaattacaaagaaataggtagattgtatgaacatacccacaaatgcctatgatttaggttaccaatgtattctttctcatttggggttttgcttctgtctgtctgtttattggaaacttgtacttcaagtagggggaatcctaattctaataactccttagctaagttttattattcaggcaataaacatgttttcatgtaaaaaaaaaaaaaaaaaaa

SEQ ID NO: 351 - DNA, 538 bp, Homo sapiens
  misc_feature (462)..(462): n equals a,t,g, or c
  misc_feature (498)..(498): n equals a,t,g, or c
  misc_feature (520)..(520): n equals a,t,g, or c
gcttgtaggtactcattgaggtttattgtgtaagatgaatgaatgttgcaaattcctaaacatgtgattcagatgcccaatcttactctgttactttatgaaaattttttaaagctatatgatgttatatcaaaatatgttgttatactttaggataatcggtgtgttagccctgaatttcagcataagtcccatttttttccatgggagtctaggaaagctatatgtttattcagcagcaaaatacagtttggaacttaaataaactattgatcaattctggtcttatgctagaaggaataaagcatcaagaaaaagaaaagattgctgtcaagaccaggaaaattgacaatagagtattagaatgcagaaatgaggggaagtggaaargccascaagtaggagagaaaaagtgcagggacagtagaaagtgaatgtaggagcttctgacccagcactcangaacgcaattcatccctaaaaagctgttgcgtctangttgccagtaaccaattaaaanccgtttgaagtagagtga

SEQ ID NO: 352 - DNA, 1346 bp, Homo sapiens
  misc_feature (5)..(5): n equals a,t,g, or c
  misc_feature (17)..(17): n equals a,t,g, or c
  misc_feature (21)..(21): n equals a,t,g, or c
  misc_feature (36)..(36): n equals a,t,g, or c
  misc_feature (107)..(107): n equals a,t,g, or c
  misc_feature (150)..(150): n equals a,t,g, or c
  misc_feature (323)..(323): n equals a,t,g, or c
  misc_feature (1307)..(1307): n equals a,t,g, or c
  misc_feature (1337)..(1337): n equals a,t,g, or c
  misc_feature (1341)..(1341): n equals a,t,g, or c
  misc_feature (1343)..(1343): n equals a,t,g, or c
tcccntcaaggccgggnggcntgttcttggcctttncaacttttgcctttccactatttagaatgcaggtgtgtctgtcctgcaacccagcttctggctctggaaanccagctgcatcacccatgtgcctggaccttctccagaccatgnaggcccaggcgagtgactcactgccattcagtctccatctttgggcagatccaccatgagacataacttcccagaaatccagttacaaggaggaataagtattgaagacttaagaaatgcattttgcagcaggtcctcgctgtactggggcagcggtccattcatagagcccngctagaatagaggtcacaagctcagaagcttctctaaggcaggcaggaaatttaagtcgatactatgatctgcattgtgggctggaatgaacggaaggtgcctagtctaaacagctgcttgttgctcagctgttgttgccgtattgggaattcaagcctaatgatgtttggtattcccattttcaaaagaagtcaggaaatgcagatttctatgtaaatttttaaaacttctgaactgtgtatgagccatacaaaatacatttgcaggccagtcgacatcctctgatccagaatatcaatttgtgagacaagttgttggtgaggcagcattmcatagtagttaaaagcatacattttagagccagactgcccatgtccaaaccctggtcccatcactcactmccttycatttcacttctctttgcttcactttcctcatcagtaaaataaaaataatatcagtacctacctcatagggtttcatgagcattaaataaattaaaacccataaagtactttcaatgctatcaggcatttagttacatggtaaataagtgtttaaaacatttaaaacaaaagttcaaagataataarcaaggaaacagaaaacctgacaggccagctttggaaccttcttgatggcagatctatcaacatttctccctttggctgggatgaaaaggcatttgggaataaaagatcccataaaaataaatgagaagaagtgaaacaccttcattatggcaattttggtgtcagagcctaaaagacagagggatcaaaatattgcagtactaaaatctgatggtttcatgtagaaatgagatttaagcttattaaaatgtatttctttctggtgttaataacccttcacaagacctgggcaattttgaaagaaggaaagaaaatggttctccctgtggacaaraagaaacaaatgactattaaattttctaatttggagtgaactagggkgrttccccnagtttatgtgggaaggtttcagtgagggtngtangngaa

SEQ ID NO: 353 - DNA, 912 bp, Homo sapiens
  misc_feature (36)..(36): n equals a,t,g, or c
  misc_feature (93)..(93): n equals a,t,g, or c
  misc_feature (158)..(158): n equals a,t,g, or c
  misc_feature (592)..(592): n equals a,t,g, or c
aaaatggttctccctgtggcaagaagaaccaaatgnctattaaattttctaatttggagtgaactaagttgatccctaggtttttgtgggagnccggggtgggggagtccagtggaaagcaattgctggagagtagtccttgttctttgctgacagancaggagcagagtgtggaatgaaaactcaatagcctcctctattctcaagagacaattgacttccatctgtttaaacctccccaggggaccctgctccccccatttccatttactctcctttccaccaacctagggtgacattaagaaaaccaaacccatttgaaacacaagctcttacacatcaaaagtcaggggagaagtctggttgacctgtaagccactgcatgaggcacaaagatgcaaaaaggaactttcaggaacaactgctgctccgaggactctatgtcagatataacatccgctttggcccaaaagtaggcttgagccccagaagaggaggaatgtcmagtatgtttaaaatgtgaaacctttagttatacttgctctttactcagaaaggagagagtattcccttatgccaacgaggtctctgngagttgtttgcactattggtagcaggtgctgcctggggtagctcttatggtctgtgcttgaagtgtgcaccagctgctgccctggacatgactgttggtccctgcatacaagcagccacctttaaacagatcaaatgactcttatgatgacagctgtctcactrtactttcaaactggttttaatttggttacttgcaacctaagacagcaracagcattttagggatgaattgcgttcctgaagtgcatgggtcagaaagctcmtacattcactttytactgtccctgcactttttctatcctacttgctgcccttcca

SEQ ID NO: 354 - DNA, 995 bp, Homo sapiens
  misc_feature (12)..(12): n equals a,t,g, or c
  misc_feature (925)..(925): n equals a,t,g, or c
  misc_feature (953)..(953): n equals a,t,g, or c
agggtcaagggnagagacccaggtcctgacagcactccctgaccatgcccccatttctccccagggttccacctgagtgctacagtggtgccacctcagatggtccctcctaaaggggcctacaacgtggctgtgatgtttgaccgctgccgggtcacttcctgcagctgtacctgtggggctggggccaaatggtgcacccacgtcgtggcactctgtctcttccgcatccacaacgcttctgcagtctgcctgcgagccccagtctcagagtccctgtcccggctacagagggaccagctgcaaaagtttgctcagtacctcatcagtgagctccctcagcaggtgggtgaggtcggcaccccctcctgcaattagctccgggccaggccgcataacagccttcctgttaggcccaggcctccatgggttcacctaggccgtgttctgcctgcctccgtctctttctccctcagatcctccccacagctcagcgtctcctggackaactcctgtyttcccagtcaacagccatcaatacagtgtgtggagctccggaccccacagcagggccctcagcatcggaccagagtacttggtatctggatgaatcgacactcactgacaacatcaaaaagacactgcacaagttctgtggcccctyccctgtggtcttcagtgatgtgaactccatgtatctgtcttccacggagccgccagccgctgctgaatgggcatgtctgctgcgccctctgaggggccgtgagccagagggcgtctggaacctgctaagcattgtgcgggagatgttcaagcggagggacagcaatgctgcccccttgttggaaatcctcactgaccagtgcctcacctatgaacagataacaggttggtggkatagcgtacgtacctcagcctcacacancagtgccagtgggcacacggggccgttncaacgggcaatcagaagtggcaacccatgcctgtgccacatt

SEQ ID NO: 355 - DNA, 751 bp, Homo sapiens
  misc_feature (146)..(146): n equals a,t,g, or c
tccctcggggtccaaagtgagatgagtaccatgcggtgccggccagaggaacttcggaaggggacactctgtgactatcggcttgtgttgcctctcatgctggccagtttcatctttgacgttctctgtgctccaggtatgatgcntgaccctacagtaagtggggaactggggtaggggtagctttctctaagaaagaccaagagccccaagtttctgaatcacctttaggacccatcaggcagcttcatgggtaggtctgtgatgatgaggattttgggttcccctgtattttttcccatgcatgatacttctgtctgcctgacttaccccaacttttatacagtggtttctcccacaggttcccggcccccaagtcgcaactggaacagcgagacacctggggatgaggagcttggatttgaagcagcagttgctgccttgggcatgaagacaacagtgagcgaggcagaacatcccctcttatgtgaaggcacacgtcgggagaagggtgacctggcattagcactaatgatcacttacaaggacgaccaggccaagcttaagaagaaaattagccgggcatggtggcgcgcgcctgtagtcccagctactcgggaggctgaggtgggagaattgcttgagcccaggagtttgaggctacagtgagctataatcataccactgcactccagcctgggcaacagagcgagaccctgtctcttaaaaaaaaaaaaaaaagaaaactcga

SEQ ID NO: 356 - DNA, 1177 bp, Homo sapiens
  misc_feature (1095)..(1095): n equals a,t,g, or c
  misc_feature (1115)..(1115): n equals a,t,g, or c
  misc_feature (1142)..(1142): n equals a,t,g, or c
  misc_feature (1162)..(1162): n equals a,t,g, or c
agccaccatgcccggcctagattaaaaatttgaagacatattctctactatgagccaatgaaattactcattttgtttctatcccatttgctgtcccttgcttttggaattttgtgtcttagtgtgactgtgattctttctctccttttgtctttcagcaaacggggattcagcgtccgatcctttggaacagggactcacgtgaagcttccaggaccagctcccgacaagcccaatgtttatgatttcaaaaccacatatgaccagatgtacaatgatcttcttaggaaagacaaagaactctatacacagaatgggattttacatatgctggacagaaataagagaatcaagccccggccagaaagattccagaactgcaaagacctgtttgatctgatcctcacttgcgaagagagagtgtatgaccaggtggtggaagatctgaattccagagaacaggagacctgccagccygtgcacgtggtcaatgtggacatccaggacaaccacgaggaggccaccctgggggcgtttctcatctgtgagctctgccagtgtatccagcacacggaagacatggagaacgagatcgacgagctgctgcaggagttcgaggagaagagtggccgcacctttctgcacaccgtctgcttctactgagcccagcgcccgcatggagccgcctctggagcttcctgttgttcatactttttccttcctgacatttgtttttacttacaggtgttctgctggtgacggtagcattacccaaataaactgtgcatatgaaatgggagaggagatgccaaaacgccagatgaaagcaatcaagtttcttcttttccacttttacttatgagcrggatattgattacaaagtttttcttctttaaccaaaaaggaaagacaacggtttgtgtgcacttcccgacatacctgtgtcttcgtgtgcctgccttccctccctcctccccaccgggccggactgtacagagccctgctgcggcgtgttaggaatgacctggaattgtcaataaacagatgctgctgtcaaaaaaaaaaaaaaaaaaaaaaaaaaaaaaaaaaaraaancaaaaaaaaaaaaaaaaggnggggccgaaggttttttccctttggtnggggttatttttggcttggnattggccttcgtttt

SEQ ID NO: 357 - DNA, 1775 bp, Homo sapiens
  misc_feature (820)..(820): n equals a,t,g, or c
gcggcgcgggtgggggttgtgcgttttacgcaggctgtggcagcgacgcggtccccagcctgggtaaagatggccccatggcccccgaagggcctagtcccagctgtgctctggggcctcagcctcttcctcaacctcccaggacctatctggctccagccctctccacctccccagtcttctcccccgcctcagccccatccgtgtcatacctgccggggactggttgacagctttaacaagggcctggagagaaccatccgggacaactttggaggtggaaacactgcctgggaggaagagaatttgtccaaatacaaagacagtgagacccgcctggtagaggtgctggagggtgtgtgcagcaagtcagacttcgagtgccaccgcctgctggagctgagtgaggagctggtggagagctggtggtttcacaagcagcaggaggccccggacctcttccagtggctgtgctcagattccctgaagctctgctgccccgcaggcaccttcgggccctcctgccttccctgtcctgggggaacagagaggccctgcggtggctacgggcagtgtgaaggagaagggacacgagggggcagcgggcactgtgactgccaagccggctacgggggtgaggcctgtggccagtgtggccttggctactttgaggcagaacgcaacgccagccatctggtatgttcggcttgttttggcccctgtgcccgatgctcaggacctgaggaatcaaactgtttgcaatgcaagaagggctgggccctgcatcacctcaagtgtgtagactgtgccaaggcctgcntaggctgcatgggggcagggccaggtcgctgtaagaagtgtagccctggctatcagcaggtgggctccaagtgtctcgatgtggatgagtgtgagacagaggtgtgtccgggagagaacaagcagtgtgaaaacaccgagggcggttatcgctgcatctgtgccgagggctacaagcagatggaaggcatctgtgtgaaggagcagatcccagagtcagcaggcttcttctcagagatgacagaagacgagttggtggtgctgcagcagatgttctttggcatcatcatctgtgcactggccacgctggctgctaagggcgacttggtgttcaccgccatcttcattggggctgtggcggccatgactggctactggttgtcagagcgcagtgaccgtgtgctggagggcttcatcaagggcagataatcgcggccaccacctgtaggacctcctcccacccacgctgcccccagagcttgggctgccctcctgctggacactcaggacagcttggtttatttttgagagtggggtaagcacccctacctgccttacagagcagcccaggtacccaggcccgggcagacaaggcccctggggtaaaaagtagccctgaaggtggataccatgagctcttcacctggcggggactggcaggcttcacaatgtgtgaatttcaaaagtttttccttaatggtggctgctagagctttggcccctgcttaggattaggtggtcctcacaggggtggggccatcacagctccctcctgccagctgcatgctgccagttcctgttctgtgttcaccacatccccacaccccattgccacttatttattcatctcaggaaataaagaaaggtcttggaaagttaaaaaaaaaaaaaaaaaaaaaaaaaaaaactcgagggggggcccgtacccaatcgccctatgatgtagtcgtattaca

SEQ ID NO: 358 - DNA, 866 bp, Homo sapiens
  misc_feature (14)..(14): n equals a,t,g, or c
  misc_feature (27)..(27): n equals a,t,g, or c
  misc_feature (33)..(33): n equals a,t,g, or c
  misc_feature (105)..(105): n equals a,t,g, or c
cctggcttgctggncaagccttggtgnccatgntgaacaagttttgtggaagttctggggagactccaagaactaccaggaacagggatacgagtgccaggctgnatctcttgctcctctgcagagtcagcaggcttcttctcagagatgacagaagacgagttggtggtgctgcagcagatgttctttggcatcatcatctgtgcactggccacgctggctgctaagggcgacttggtgttcaccgccatcttcattggggctgtggcggccatgactggctactggttgtcagagcgcagtgaccgtgtgctggagggcttcatcaagggcagataatcgcggccaccacctgtaggacctcctcccacccacgctgcccccagagcttgggctgccctcctgctggacactcaggacagcttggtttatttttgagagtggggtaagcacccctacctgccttacagagcagcccaggtacccaggcccgggcagacaaggcccctggggtaaaaagtagccctgaaggtggataccatgagctcttcacctggcggggactggcaggcttcacaatgtgtgaatttcaaaagtttttccttaatggtggctgctagagctttggcccctgcttaggattaggtggtcctcacaggggtggggccatcacagctccctcctgccagctgcatgctgccagttcctgttctgtgttcaccacatccccacaccccattgccacttatttattcatctcaggaaataaagaaaggtcttggaaagttaaaaaaaaaaaaaaaaaaaaaaaaaaaaactcgagggggggcccgtacccaatcgccctatgatgtagtcgtattaca

SEQ ID NO: 359 - DNA, 1237 bp, Homo sapiens
agcaaacccaggaaggtgtggcgtccccgcttcgcgccaagatggtgctggtgctgcgccatcctttgtgtgcccgggaaagggcgttccgggagccgggtcgggggctcctgactcgcactgggcagcatgacggtgcgccggctgtcactgctgtgccgggacctctgggcgctgtggctgctgctgaaggccggcgcagtgcgtggggcgcgggcgggtcctcgcctccccggaaggtgttgtggggcgacatgcggggacgccgggcgggggtggacgttctgggcccagccctgtcctcagaagctgctggggcagaagcccggggctgggggatgccggggatgggtgttggggtgggtgcctccgagaccagaggagccctgttccttggcagggaaggtgtgcacgggccttgcccgatggatggtttagggccatggccctggggtccctggtgagcagtggggccgcctctgcccttggcctgtgagggactgtctgtgctggtcccagaaggctgggatcacctttccactggctcctttgttcgaggtttttcatagacaggctatgtggacaaatgagggcagcgcccacgtctggctggtggaggggctgcggctcctccttggaggggacgcctggccactgctgtccccacaatggggccacccgtggtgcaaggcgtgacaagctgccctctctaggtaagcaggacttgggaggcccctggccaagcctgtggacccggctgggcggcctctgtggtctcaggtttgggtgtgtttggtctggtcagggctcaggggctgctggtccacactggccccatcctgacaattggagctttggggcaaggtccctggagaaggggtcacgtcgggaggaaacagcctgggttttgttgatgcttttctaagaatggagtactcgttttcaagagatttgtcctaattatattttccagcgggtacttatgccaagtattgatgaataattcataaaataagcatctttgtgaattttagtgaatcagaccttaactatcaacggcaatgaatgaacatctaaagtttccaattttaaagtaaagaactggctgggtacagcagttcacgcctgtaatcccagcactttgggaggccaaggctagaggatcgcttgagcccaggagtttgagatcagcctgggcaacataccaagacctcatctgttaaaaaaaaaaaaaaaa

SEQ ID NO: 360 - DNA, 1681 bp, Homo sapiens
cgatggccccgcggccgctctagaaagtcccgttttttttttttttttttttttttttttttttagagtacgttctgcattttatttytgcaggcaacactttgctcaccagcaagaacacagcccraggaagggacccaataacctttcaaaacscaaactgctkcctgcggtgagggcccagggtcctccacggagaggacaggcatcttcctttcccaccaggaaggagtcagcccggagcctctgctatgtgcaaggcggtgtgcaagcaccggctgcggctctttgctgtctcttctttctctttggggctgggctgggtgtgcgttctggtgctgatgctttggcctgtgaggctgagcttggcayctcgacccgttcaattacagcaacgaagaagccactgctragygtggtctcaggggargcccggaggcagtgctcggcacccgggaacgtgctcaggcctcggtggggccaggcaggcagggcgggagctagcctgaaggcgcccgggttctgctgcagcgcatctcgcaccacgtcttcattctcctcctggcagagggagcacgtggagtagacgagccgctgcagggaagggaaagtgagcgcgtggcacagggctcgctgctggaaccctgccagggcatgcagacgcaccgggctaggtgtscctgccccgggmtcctccagctgtctgctcggcatacccgagccactgcaggaaggatccagcaggayrtagtggacctcaygrtagcgyggatcyragggggagaccgccaggaagtcctcctcagccagytcacagcargagacgccagcccrggccagcagcgtggccatggatgccagccgcttggcatccaggtcaaaggcaaagatcttcccttggttcttcagaagagcagccaagtgactggtcttattgcctggggcggcacaggcatcgatgacatgggagcctggcggggggtccagcagcatggctgggagacagctggccctgtcctgcagaatgaggtgtccggcccggtacagtgggtgttcatgcagatctgtctgggcgggaaacaccagcagctccggcatcaaggggtccaggagaaaatgcttccccttgagggctcgtaagtcatcgaggctggaagcccgaccctgataggagaaaccttgtctcttgaaataatcaactacatcatcggagcaggtcttgagagtgttcacacgcacaaatcgaggcagctgggaggctggaccaggcctggatcccacttccaacaggtcctcattccggctcacaccccgatgaaccttgagccgagccaactcagccttgagcctcgcctggtgccggcccaacagagccttccatcggcccccaccccctcgaaagccctttcccaacaacaactcatacactagcaccttggccaggtgcggccgcagcttcttctccgcacggaggaggccggcgctggcgatcacagcatccagcacggcggagtagcgctgcgtttcgcacaccagcgcgtacagctgcttcacgttctggaagttgctggagtacaccaaccccttgatagagcctggcggctctccacgccggccaacacgcctgcagctgcagcatacagccccatgttccgtcgcgctttacggctttgtggcaaaa

SEQ ID NO: 361 - DNA, 1863 bp, Homo sapiens
gactaggccgcgagcttagtcctgggagccgcctccgtcgccgccgtcagagccgccctatcagattatcttaacaagaaaaccaactggaaaaaaaaatgaaattccttatcttcgcatttttcggtggtgttcaccttttatccctgtgctctgggaaagctatatgcaagaatggcatctctaagaggacttttgaagaaataaaagaagaaatagccagctgtggagatgttgctaaagcaatcatcaacctagctgtttatggtaaagcccagaacagatcctatgagcgattggcacttctggttgatactgttggacccagactgagtggctccaagaacctagaaaaagccatccaaattatgtaccaaaacctgcagcaagatgggctggagaaagttcacctggagccagtgagaataccccactgggagaggggagaagaatcagctgtgatgctggagccaagaattcataagatagccatcctgggtcttggcagcagcattgggactcctccagaaggcattacagcagaagttctggtggtgacctctttcgatgaactgcagagaagggcctcagaagcaagagggaagattgttgtttataaccaaccttacatcaactactcaaggacggtgcaataccgaacgcagggggcggtggaagctgccaaggttggggctttggcatctctcattcgatccgtggcctccttctccatctacagtcctcacacaggtattcaggaataccaggatggcgtgcccaagattccaacagcctgtattacggtggaagatgcagaaatgatgtcaagaatggcttctcatgggatcaaaattgtcattcagctaaagatgggggcaaagacctacccagatactgattccttcaacactgtagcagagatcactgggagcaaatatccagaacaggttgtactggtcagtggacatctggacagctgggatgttgggcagggtgccatggatgatggcggtggagcctttatatcatgggaagcactctcacttattaaagatcttgggctgcgtccaaagaggactctgcggctggtgctctggactgcagaagaacaaggtggagttggtgccttccagtattatcagttacacaaggtaaatatttccaactacagtctggtgatggagtctgacgcaggaaccttcttacccactgggctgcaattcactggcagtgaaaaggccagggccatcatggaggaggttatgagcctgctgcagcccctcaatatcactcaggtcctgagccatggagaagggacagacatcaacttttggatccaagctggagtgcctggagccagtctacttgatgacttatacaagtatttcttcttccatcactcccacggagacaccatgactgtcatggatccaaagcagatgaatgttgctgctgctgtttgggctgttgtttcttatgttgttgcagacatggaagaaatgctgcctaggtcctagaaacagtaagaaagaaacgttttcatgcttctggccaggaatcctgggtctgcaactttggaaaactcctcttcacataacaatttcatccaattcatcttcaaagcacaactctatttcatgctttctgttattatctttcttgatactttccaaattctctgattctagaaaaaggaatcattctcccctccctcccaccacatagaatcaacatatggtagggattacagtgggggcatttctttatatcacctcttaaaaacattgtttccactttaaaagtaaacacttaataaatttttggaagatctctgaaaaaaaaaaaaaaaaaaagggcggccgc

SEQ ID NO: 362 - DNA, 1134 bp, Homo sapiens
tccatctacagtcctcacacaggtattcaggaataccaggatggcgtgcccaagattccaacagcctgtattacggtggaagatgcagaaatgatgtcaagaatggcttctcatgggatcaaaattgtcattcagctaaagatgggggcaaagacctacccagatactgattccttcaacactgtagcagagatcactgggagcaaatatccagaacaggttgtactggtcagtggacatctggacagctgggatgttgggcagggtgccatggatgatggcggtggagcctttatatcatgggaagcactctcacttattaaagatcttgggctgcgtccaaagaggactctgcggctggtgctctggactgcagaagaacaaggtggagttggtgccttccagtattatcagttacacaaggtaaatatttccaactacagtctggtgatggagtctgacgcaggaaccttcttacccactgggctgcaattcactggcagtgaaaaggccagggcatcatggaggaggttatgagcctgctgcagcccctcaatatcactcaggtcctgagccatggagaagggacagacatcaacttttggatccaagctggagtgcctggagccagtctacttgatgacttatacaagtatttcttcttccatcactcccacggagacaccatgactgtcatggatccaaagcagatgaatgttgctgctgctgtttgggctgttgtttcttatgttgttgcagacatggaagaaatgctgcctaggtcctagaaacagtaagaaagaaacgttttcatgcttctggccaggaatcctgggtctgcaactttggaaaactcctcttcacataacaatttcatccaattcatcttcaaagcacaactctatttcatgctttctgttattatctttcttgatactttccaaattctctgcattctagaaaaaggaatcattctcccctccctcccaccacatagaatcaacatatggtagggattacagtgggggcatttctttatatcacctcttaaaaacattgtttccactttaaaagtaaacacttaataaatttttggaagatctctgaaaaaaaaaaaaaaaaaaaaaaaaaaaa

SEQ ID NO: 363 - DNA, 626 bp, Homo sapiens
gcccacgcgtccgcctaaacacagtcaccatgaagctgggctgtgtcctcatggcctgggccctctacctttcccttggtgtgctctgggtggcccagatgctactggctgccagttttgagacgctgcagtgtgagggacctgtctgcactgaggagagcagctgccacacggaggatgacttgactgatgcaagggaagctggcttccaggtcaaggcctacactttcagtgaacccttccacctgattgtgtcctatgactggctgatcctccaaggtccagccaagccagtttttgaaggggacctgctggttctgcgctgccaggcctggcaagactggccactgactcaggtgaccttctaccgagatggctcagctctgggtccccccgggcctaacagggaattctccatcaccgtggtacaaaaggcagacagcgggcactaccamtgcagtggcatcttccagagccctggtcctgggatcccagaaacagcatctgttgtggctatcacagtccaagaactgtttccagcgccaattctccttctacaaggatggaaggatagtgcaaagcaggggggctctcctcagaattccagatccccacagcttcagaaa

SEQ ID NO: 364 - DNA, 152 bp, Homo sapiens
  misc_feature (41)..(41): n equals a,t,g, or c
cagcccagcttcatggtgactgtgtttaggtctccctcgtnccgaattcctgcagcccgggggatccactagttctagagcggccgccaccgcggtrgagctccagcttttgttccctttagtgagggttaatttcgagcttggcgtaatca

SEQ ID NO: 365 - DNA, 1760 bp, Homo sapiens
  misc_feature (1693)..(1693): n equals a,t,g, or c
  misc_feature (1748)..(1748): n equals a,t,g, or c
gggaattctccatcaccgtggtacaaaaggcagacagcgggcactaccactgcagtgcatcttccasagccctggtcctgggatcccagaaacagcatctgttgtggctatcacagtccaagaactgtttccagcgccaattctcagagctgtaccctcagctgaaccccaagcaggargccccatgaccctgagttgtcagacaaagttgcccctgcagaggtcagctgcccgcctcctcttctccttctacaaggatggaaggatagtgcaaagcagggggctctcctcagaattccagatccccacagcttcagaagatcactccgggtcatactggtgtgaggcagccactgaggacaaccaagtttggaaacagagcccccagctagagatcagagtgcagggtgcttccagctctgctgcacctcccacattgaatccagctcctcagaaatcagctgctccaggaactgctcctgaggaggcccctggctctgcctccgccgccaaccccatcttctgaggatccaggcttttcttctcctctggggatgccagatcctcatctgtatcaccagatgggccttcttctcaaacacatgcaggatgtgagagtcctcctcggtcacctgctcatggagttgagggaattatctggccaccrgaagcctgggaccacaaaggctactgctgaatagaagtaaacagttcatccatgatctcacttaaccaccccaataaatctgattctttattttctcttcctgtcctgcacatatgcataagtacttttacaagttgtcccagtgttttgttagaataatgtagttaggtgagtgtaaataaatttatataaagtgagaattagagtttagctataattgtgtattctctcttaacacaacagaattctgctgtctagatcaggaatttctatctgttatatcgaccagaatgttgtgatttaaagagaactaatggaagtggattgaatacagcagtctcaactgggggcaattttgcccccaagaggacattgggcaatgtttggagacattttggtcattatacttggggggttgggggatggtgggatgtgtgtgctactggcatccagtaaatagaagccaggggtgccgctaaacatcctataatgcacagggcagtaccccacaacgaaaaataatctggcccaaaatgtcagttgtactgagtttgagaaaccccagcctaatgaaaccctaggtgttgggctctggaaatgggactttgtccyttctaattattatctctttccagcctcattcagctattcttactgacataccagtctttagctggtgctatggtctgttctttagttctagtttgtatcccctcaaaagccattatgttgaaatcctaatccccaaggtgatggcattaagaagtgggcctttgggaagtgattagatcaggagtgcagagccctcatgattaggattagtgcccttatttaaaaaggccccagagagctaactcacccttccaccatatgaggacgtggcaagaagatgacatgtatgagaaccaaaaaacagtgtcgccaaacaccgactctgtcgttgccttgatcttgaacttccagcctccagaactatgagaaataaaattctgttgtttgtaagctaatccagttgtgtaatttggnatagtagcccaaatggactaggcagttggcctctggccacatgatgagttatggnatgtaaaaatac

SEQ ID NO: 366 - DNA, 880 bp, Homo sapiens
ggcacgagactggatgaacacaaactccacatgtatctttctgccttgcagtccttgatcccatctctctttgcattagtgctacagaatgcacctttctccagcaaagccaagcttcatggtgaagtgccacagatagaagtgactaggtttcctcggcctatgtcgcctcttcaagatgtgtccactattatcggaagtcgtgagcaattggcagtgctgctgcaactttatgactaccagctagaacaagagggtacaacaggctgggagagtttactgtgggttgtcaatcaattgttgccacaacttatagaaatagttggcaaaattaatgttacttcaactgcctgtgtccatgaattctccagatttttctggcgcctttgccggacatttggcaaaatttttacaaacactaaggtaaaacctcagttccaggagattttaagactatctgaagaaaacattgattcctcagcaggaaatggggtcctcactaaagctacagtccccatttatgcaacaggagtccttacgtgttatattcaggaagaagaccgaaaactgttagttggattcttagaagatgtaatgacgctgctttcattatctcatgctcctcttgatagcctgaaggcttcttttgtggaattgggtgcaaacccagcctaccatgagttactattaactgttttgtggtatggtgttgtccatacttcagcactcgtgaggtgtactgctgctagaatgtttgaggtatgtcaacacatgcctctgttggtttcaattataatgatttttttttttttgcgaagaagaagggaattttttttaataaaaaggctttgcatatcaaaaaaaaaaaaaaaaaaaaaaa

SEQ ID NO: 367 - DNA, 1106 bp, Homo sapiens
  misc_feature (5)..(5): n equals a,t,g, or c
  misc_feature (857)..(857): n equals a,t,g, or c
  misc_feature (1037)..(1037): n equals a,t,g, or c
  misc_feature (1058)..(1058): n equals a,t,g, or c
tccancattatgggatacattgatgatccagacaaatatcatcagggttttgaattgttgctgtcagccttgggtgatccctcagaaagagtagttagtgctacacatcaagtatttttaccagcttacgctgcgtggactacagaacttggaaatttacagtctcatcttatacttacactactgaacaagattgaaaaacttctcagggaaggagaacatggactggatgaacacaaactccacatgtatctttctgccttgcagtccttgatcccatctctctttgcattagtgctacagaatgcacctttctccagcaaagccaagcttcatggtgaagtgccacagatagaagtgactaggtttcctcggcctatgtcgcctcttcaagatgtgtccactattatcggaagtcgtgagcaattggcagtgctgctgcaactttatgactaccagctagaacaagagggtacaacaggctgggagagtttactgtgggttgtcaatcaattgttgccacaacttatagaaatagttggcaaaattaatgttacttcaactgcctgtgtccatgaattctccagatttttctggcgcctttgccggacatttggcaaaatttttacaaacactaaggtaaaacctcagttccaggagattttaagactatctgaagaaaacattgattcctcagcaggaaatggggtcctcactaaagctacagtccccatttatgcaacaggagtccttacgtgttatattcaggaagaagaccgaaaactgttagttggattcttagaagatgtaatgacgctgctttcattatctcatgctcctcttgatagcctgaaggnttcttttgtggaattgggtgcaaaccaggcctaccatgagttactattaactgttttgkggtatggkgtkgkccatacttcagcactcgtgaggtgtactgctgctagaatgtttgagctgttggtgaagggggtgaatgaaactctggtagctcagagggttgttcctgctcttcattnactctctccagtggaccctgnaaatctctgtcaggattgccacaatttccagcctttgggactatttat

SEQ ID NO: 368 - DNA, 646 bp, Homo sapiens
  misc_feature (19)..(19): n equals a,t,g, or c
  misc_feature (544)..(544): n equals a,t,g, or c
cagatgccagggacttggncttcccccggttgaaccacaggttccaagaaacctgcagggtccagcctcccccccatccccagtyttccccaccctggcccggccctccaggtgcagaaacatgcaggcccctctccaggactgtgggaggagtgtgtccctcagactggcctgtgtcctggctcctcttaccacctcttccagaggttgtcacctgcagctgccccaggataaaggcaaggccagaraggactcctgaactcctgtgtgcctggggtggcaggggcaaacatagccaactggtggcctgagcggggccatggtgargacacccttggtggcttgtcccacatcaagctgggargtgacacttaggatgcatttttcaatattttagtgtttgaataacgggctawcttgagaaaaaaataatttgaatcacacatcacaccaaaaataaattctaggtggattttaacactttccaaaaattattattagtttagagacagggtctcactccgtcgcctaggctggagtgcangggtatgatcatggttcactgcaaccttaaactccctggcctcatatgatccccccgggctccagcccctccaaagttactgggaaactaccaaacatgccc

SEQ ID NO: 369 - DNA, 1590 bp, Homo sapiens
tttttttttttttgtttaaatgatacaacttaattttattaggacagacgctggcggccaccagaagtttgagcctctttggtagcaggaggctggaagaaaggacagaagtagctctggctgtgatggggatcttactgggcctgctactcctggggcacctaacagtggacacttatggccgtcccatcctggaagtgccagagagtgtaacaggaccttggaaaggggatgtgaatcttccctgcacctatgaccccctgcaaggctacacccaagtcttggtgaagtggctggtacaacgtggctcagaccctgtcaccatctttctacgtgactcttctggagaccatatccagcaggcaaagtaccagggccgcctgcatgtgagccacaaggttccaggagatgtatccctccaattgagcaccctggagatggatgaccggagccactacacgtgtgaagtcacctggcagactcctgatggcaaccaagtcgtgagagataagattactgagctccgtgtccagaaacactcctcaaagctactcaagaccaagactgaggcacctacaaccatgacataccccttgaaagcaacatctacagtgaagcagtcctgggactggaccactgacatggatggctaccttggagagaccagtgctgggccaggaaagagcctgcctgtctttgccatcatcctcatcatctccttgtgctgtatggtggtttttaccatggcctatatcatgctctgtcggaagacatcccaacaagagcatgtctacgaagcagccagggcacatgccagagaggccaacgactctggagaaaccatgagggtggccatcttcgcaagtggctgctccagtgatgagccaacttcccagaatctgggcaacaactactctgatgagccctgcataggacaggagtaccagatcatcgcccagatcaatggcaactacgcccgcctgctggacacagttcctctggattatgagtttctggccactgagggcaaaagtgtctgttaaaaatgccccattaggccaggatctgctgacataattgcctagtcagtccttgccttctgcatggccttcttccctgctacctctcttcctggatagcccaaagtgtccgcctaccaacactggagccgctgggagtcactggctttgccctggaatttgccagatgcatctcaagtaagccagctgctggatttggctctgggcccttctagtatctctgccgggggcttctggtactcctctctaaataccagagggaagatgcccatagcactaggacttggtcatcatgcctacagacactattcaactttggcatcttgccaccagaagacccgagggaggctcagctctgccagctcagaggaccagctatatccaggatcatttctctttcttcagggccagacagcttttaattgaaattgttatttcacaggccagggttcagttctgctcctccactataagtctaatgttctgactctctcctggtgctcaataaatatctaatcataacagcaaaaaaaaaaaaaaaaaactcgag

SEQ ID NO: 370 - DNA, 1179 bp, Homo sapiens
gggctgcaggaattcggcacgagtttaaagggtgactcgtcccacttgtgttctctctcctggtgcagagttgcaagcaagtttatcggagtatcgccatgaagttcgtcccctgcctcctgctggtgaccttgtcctgcctggggactttgggtcaggccccgaggcaaaagcaaggaagcactggggaggaattccatttccagactggagggagagattcctgcactatgcgtcccagcagcttggggcaaggtgctggagaagtctggcttcgcgttcgactgccgcaacacagaccagacctactggtgtgagtacagggggcagcccagcatgtgccaggctttcgctgctgaccccaaatcttactggaatcaagccctgcaggagctgaggcgccttcaccatgcgtgccagggggccccggtgcttaggccatccgtgtgcagggaggctggaccccaggcccatatgcagcaggtgacttccagcctcaagggcagcccagagcccaaccagcagcctgaggctgggacgccatctctgaggcccaaggccacagtgaaactcacagaagcaacacagctgggaaaggactcgatggaagagctgggaaaagccaaacccaccacccgacccacagccaaacctacccagcctggacccaggcccggagggaatgaggaagcaaagaagaaggcctgggaacattgttggaaacccttccaggccctgtgcgcctttctcatcagcttcttccgagggtgacaggtgaaagacccctacagatctgacctctccctgacagacaaccatctctttttatattatgccgctttcaatccaacgttctcacactggaagaagagagtttctaatcagatgcaacggcccaaattcttgatctgcagcttctctgaagtttggaaaagaaaccttcctttctggagtttgcagagttcagcaatatgatagggaacaggtgctgatgggcccaagagtgacaagcatacacaactacttattatctgtagaagttttgctttgttgatctgagccttctatgaaagtttaaatatgtaacgcattcatgaatttccagtgttcagtaaatagcagctatgtgtgtgcaaaataaaagaatgatttcagaaaaaaaaaaaaaaaaaaactcga

SEQ ID NO: 371 - DNA, 819 bp, Homo sapiens
gaattcggcacgaggagaatcatgggcctctggctgggcatgctggcctgtgtcttcctggcaactgctgcctttgttgcttatactgcccggctggactggaagcttgctgcagaggaggctaagaaacattcaggccggcagcagcagcagagagcagagagcactgcaaccagacctgggcctgagaaagcagtcctatcttcagtggctacaggcagttcccctggcattaccttgacaacgtattcaaggtctgagtgccacgtggacttcttcaggactccagaggaggcccacgccctttcagctcctaccagcagactatcagtgaaacagctggtcatccgccgtggggctgctctgggggcggcgtcagcacactgatggtggggctcacggtcaggatcctagccaccaggcactagcaaagaagcttggaaatagaaagccaggagtggctgtccccagtatgcaaacacaccacggtctgccctgcaaaaacaccaatggggtctagtgcaggtggacactttgaaccactcctcaaaaaaagaactttggctgatyccttgtggtgacactcagaggggtctgaacagacttgacaattctgttctggtcaagctggagttttcttctgtgacttggactgctctacagaagacatcagccaactgcacgagtcagagtccagggattgtcactattattaataatgtaaatggcttcaaatgggacactgcagataammycacaaaaaccactgttatattaaagattacacatttcctggaaaaaaaaaaaaaaaaaactcga

SEQ ID NO: 372 - DNA, 1507 bp, Homo sapiens
  misc_feature (1047)..(1047): n equals a,t,g, or c
  misc_feature (1301)..(1301): n equals a,t,g, or c
  misc_feature (1507)..(1507): n equals a,t,g, or c
ggaacgcagagcggagcgtggagagcggagcgaagctggataacaggggaccgatgatgtggcgaccatcagttctgctgcttctgttgctactgaggcacggggcccaggggaagccatccccagacgcaggccctcatggccaggggagggtgcaccaggcggcccccctgagcgacgctccccatgatgacgcccacgggaacttccagtacgaccatgaggctttcctgggacgggaagtggccaaggaattcgaccaactcaccccagaggaaagccaggcccgtctggggcggatcgtggaccgcatggaccgcgcgggggacggcgacggctgggtgtcgctggccgagcttcgcgcgtggatcgcgcacacgcagcagcggcacatacgggactcggtgagcgcggcctgggacacgtacgacacggaccgcgacgggcgtgtgggttgggaggagctgcgcaacgccacctatggccactacgcgcccggtgaagaatttcatgacgtggaggatgcagagacctacaaaaagatgctggctcgggacgagcggcgtttccgggtggccgaccaggatggggactcgatggccactcgagaggagctgacagccttcctgcaccccgaggagttccctcacatgcgggacatcgtgattgctgaaaccctggaggacctggacagaaacaaagatggctatgtccaggtggaggagtacatcgcggatctgtactcagccgagcctggggaggaggagccggcgtgggtgcagacggagaggcagcagttccgggacttccgggatctgaacaaggatgggcacctggatgggagtgaggtgggccactgggtgctgccccctgcccaggaccagcccctggtggaagccaaccacctgctgcacgaragcgacacggacaaggaygggcggctgagcaaagcgsaaatcctgggtaattggaacatgtttgtgggcagtcaggccaccaactatggygaggacctgacccggcaccacgatgagctgtgagcmccgngcacctgccacagcctcagaggcccgcacaatgaccggaggaggggccgctgtggtctggccccctccctgtccaggccccgcaggaggcagatgcagtcccaggcatcctcctkcccctgggctctcagggaccccctgggtcggcttctgtccctgtcacacccccaaccccagggaggggctgtcatagtcccagaggataagcaatacctatttctgactgagtctcccagcccagacccagggaccctnggccccaagctcagctctaagaaccgccccaacccctccagctccaaatctgagcctccaccacatagactgaaactcccctggccccagccctctcctgcctggcctggcctgggacacctcctctctgccaggaggcaataaaagccagcgccgggaaaaaaaaaaaaaaaaaaaaaaaaaaaaaaaaaaaaaaaaaaaaaaan

SEQ ID NO: 373 - DNA, 586 bp, Homo sapiens
agagcggacgaagctggataacaggggaccgatgatgtggcgaccatcagttctgctgcttctgttgctactgaggcacggggcccaggggaagccatccccagacgcaggccctcatggccaggggagggtgcaccaggcggcccccctgagcgacgctccccatgatgacgcccacgggaacttccagtacgaccatgaggctttcctgggacgggaagtggccaaggaattcgaccaactcaccccagaggaaagccaggcccgtctggggcggatcgtggaccgcatggaccgcgcgggggacggcgacggctgggtgtcgctggccgagcttcgcgcgtggatcgcgcacacgcagcagcggcacatacgggactcggtgagcgcggcctgggacacgtacgacacggaccgcgacgggcgtgtgggttgggaggagctgcgcaacgycacctatggccactasgsgcccgktgaagaatttcatgacgtggaggatgcagagacytacaaaaagatgctggytcgggacgagcggcgtttccgggtggccgaccaggatggggactcgatggccactcga

SEQ ID NO: 374 - DNA, 1792 bp, Homo sapiens
ggcacgaggttgtttgagtttggtttggagcaaaactgaggtagtcctaacatttctgggactgaatccaggcaagagaaagaagaaaaagaagaagaaaaagaggaggaaaaagtggattacacaatgacatggagaatgggaccccgtttcactatgctgttggccatgtggctagtgtgtggatcagaaccccacccccatgccactattagaggcagccacggaggacggaaagtgcctttggtttctccggacagcagtaggccagctcggtttctgaggcacactgggaggtctcgcggaattgagagatccactctggaggaaccaaaccttcagcctctccagagaaggaggagtgtgcccgtgttgagactagctcgcccaacagagccgccagcccgctcggacatcaatggggccgccgtgagacctgagcaaagaccagcagccaggggctctccgcgtgagatgatcagagatgaggggtcctcagctcggtcaagaatgttgcgtttcccttcggggtccagctctcccaacatccttgccagctttgcagggaagaacagagtatgggtcatctcagcccctcatgcctcggaaggctactaccgcctcatgatgagcctgctgaaggacgatgtgtactgtgagctggcggagaggcacatccaacagattgtgctcttccaccaggcaggagaggaaggaggcaaggtgagaaggatcaccagcgagggccagatcctggagcagcccctggaccctagcctcatccctaagctgatgagcttcctgaagctggagaagggcaagtttggcatggtgctgctgaagaagacgctgcaggtggaggagcgctatccatatcccgttaggctggaagccatgtacgaggtcatcgaccaaggccccatccgtaggatcgagaagatcaggcagaagggctttgtccagaaatgtaaggcctctggtgtagagggccaggtggtggcggaggggaatgacggtggagggggagcaggaaggccaagcctgggcagcgagaagaagaaagaggacccaaggagagcacaagtcccaccaaccagagagagtcgggtgaaggtcctgagaaaactggccgccactgcaccagcttttccccaacctccctcaacccccagagccaccacccttcctcctgccccagccacaacagtgactcggtccacgtcccgggcggtaacagttgctgcaagacctatgaccaccactgcctttcccaccacgcagaggccctggaccccctcaccctcccacaggccccctacaaccactgaggtgatcactgccaggagaccctcagtttcagagaatctttaccctccatcccggaaggatcagcacagggagaggccacagacaaccaggaggcccagcaaggccaccagcttggagagcttcacaaatgcccctcccaccaccatctcagaacccagcacaagggctgctggcccaggccgtttccgggacaaccgcatggacaggcgggaacatggccaccgagacccaaatgtggtgccaggtcctcccaagccagcaaaggagaaacctcccaaaaagaaggcccaggacaaaattcttagtaatgagtatgaggaagtatgacctcagccggcctactgcctctcagctggaggacgagctgcaggtggggaatgttccccttaaaaaagcaaaggagtctaaaaagcatgaaaagcttgagaaaccagagaaggagaagaaaaaaaaaaaaaaaaaa

SEQ ID NO: 375 - DNA, 1673 bp, Homo sapiens
ggcacgagagaatgggaccccgtttcactatgctgttggccatgtggctagtgtgtggatcagaaccccacccccatgccactattagaggcagccacggaggacggaaagtgcctttggtttctccggacagcagtaggccagctcggtttctgaggcacactgggaggtctcgcggaattgagagatccactctggaggaaccaaaccttcagcctctccagagaaggaggagtgtgcccgtgttgagactagctcgcccaacagagccgccagcccgctcggacatcaatggggccgccgtgagacctgagcaaagaccagcagccaggggctctccgcgtgagatgatcagagatgaggggtcctcagctcggtcaagaatgttgcgtttcccttcggggtccagctctcccaacatccttgccagctttgcagggaagaacagagtatgggtcatctcagcccctcatgcctcggaaggctactaccgcctcatgatgagcctgctgaaggacgatgtgtactgtgagctggcggagaggcacatccaacagattgtgctcttccaccaggcaggagaggaaggaggcaaggtgagaaggatcaccagcgagggccagatcctggagcagcccctggaccctagcctcatccctaagctgatgagcttcctgaagctggagaagggcaagtttggcatggtgctgctgaagaagacgctgcaggtggaggagcgctatccatatcccgttaggctggaagccatgtacgaggtcatcgaccaaggccccatccgtaggatcgagaagatcaggcagaagggctttgtccagaaatgtaaggcctctggtgtagagggccaggtggtggcggaggggaatgacggtggagggggagcaggaaggccaagccagggcagcgagaagaagaaagaggacccaaggagagcacaagtcccaccaaccagagagagtcgggtgaaggtgctgagaaaactggccgccactgcaccagcttttccccaacctccctcaacccccagagccaccacgcttactcctgccccagccacaacagtgactcggtccacgtcccgggcgggaaacagatgctgcaagacctatgaccaccactggctttcccaccacgcagaggccctggaccccctcacccttcccacaggccccctacaaccactgagggtgatcactgccaggagaccctcagtttccagagaatctttaccctccattcccggaaggatcagcacagggagaggccacagacaaccaggaggcccagcaaggcccaccagcttggagagcttcacaaatgcccctcccaccaccatctcagaacccagcacaagggctgctggcccaggccgtttccgggacaaccgcatggacaggcgggaacatggccaccgagacccaaatgtggtgccaggtcctcccaagccagcaaaggagaaacctcccaaaaagaaggcccaggacaaaattcttagtaatgagtatgaggagaagtatgacctcagccggcctactgcctctcagctggaggacgagctgcaggtggggaatgttccccttaaaaaagcaaaggagtctaaaaagcatgaaaagcttgagaaaccagagaaggagaagaaaaaaaaaaaaaaaaaa

SEQ ID NO: 376 - DNA, 2084 bp, Homo sapiens
  misc_feature (775)..(775): n equals a,t,g, or c
  misc_feature (2080)..(2080): n equals a,t,g, or c
  misc_feature (2083)..(2083): n equals a,t,g, or c
ggcagagggccatttcctgcaaagagccaaacccccattcctctgtgcccctcctctcccaccaagtgctttataaaaatagctcttgttaccggaaataactgttcatttttcactcctccctcctaggtcacacttttcagaaaaagaatctgcatcctggaaaccagaagaaaaatatgagacggggaatcatcgtgtgatgtgtgtsctgcctttggctgagtgtgtggagtcctgctcaggtgttaggtacagtgtgtttgatcgtggtggcttgaggggaaccgcttgttcagagctgtgactgcggctgcactgcagagaagctgcccttggctgctcgtagcgccgggccttctctcctcgtcatcatccagagcagccagtgtccgggaggcagaaggtaccggggcagctactggaggactgtgcgggcctgcctgggctgccccctccgccgtggggccctgttgctgctgtccatctatttctactactccctcccaaatgcggtcggcccgcccttcacttggatgcttgccctcctgggccttctcgcaggcactgaacatcctcctgggcctcaagggcctggccccagctgagatctctgcagtgtgtgaaaaagggaatttcaacgtggcccatgggctggcatggtcatattacatcggatatctgcggctgatcctgccagagctccaggcccggattcgaacttacaatcagcattacaacaacctgctacggggtgcagtgagccagcggtgtnatattctcctcccattggactgtggggtgcctgataacctgagtatggctgaccccaacattcgcttcctggataaactgccccagcagaccggtgaccgtgctggcatcaaggatcgggtttacagcaacagcatctatgagcttctggagaacgggcagcgggcgggcacctgtgtcctggagtacgccacccccttgcagactttgtttgccatgtcacaatacagtcaagctggctttagcggggaggataggcttgagcaggccaaactcttctgccggacacttgaggacatcctggcagatgcccctgagtctcagaacaactgccgcctcattgcctaccaggaacctgcagatgacagcagcttctcgctgtcccaggaggttctccggcacctgcggcaggaggaaaaggaagaggttactgtgggcagcttgaagacctcagcggtgcccagtacctccacgatgtcccaagagcctgagctcctcatcagtggaatggaaaagcccctccctctccgcacggatttctcttgagacccagggtcaccaggccagagcctccagtggtctccaagcctctggactgggggctctcttcagtggctgaatgtccagcagagctatttccttccacagggggccttgcagggaagggtccaggacttgacatcttaagatgcgtcttgtccccttgggccagtcatttcccctctctgagcctcggtgtcttcaacctgtgaaatgggatcataatcactgccttacctccctcacggttgttgtgaggactgagtgtgtggaagtttttcataaactttggatgctagtgtacttagggggtgtgccaggtgtctttcatggggccttccagacccactccccacccttctccccttcctttgcccggggacgccgaactctctcaatggtatcaacaggctccttcgccctctggctcctggtcatgttccattattggggagccccagcagaagaatggagaggaggaggaggctgagtttggggtattgaatcccccggctcccaccctgcagcatcaaggttgctatggactctcctgccgggcaactcttgcgtaatcatgactatctctaggattctggcaccacttccttccctggccccttaagcctagctgtgtatcggcacccccaccccactagagtactccctctcacttgcggtttccttatactccacccctttctcaacggtccttttttaaagcacatctcagattaaaaaaaaaaaaaaaaaaaaaaaagggggggcngcnt

SEQ ID NO: 377 - DNA, 720 bp, Homo sapiens
ggcacgagatttctcacaatgacaaattctcaaatattgctaatagtactgtggattttcctacattggtaaattgaaggaattgctaaatgctgaattcagcaaccagtttgagattgttgaaaataaagattgtttctttttcaatgcaagttcacagatcactggagttctagctacagtttgttctagaccagaggttgcagatatttttgtcctataaagagacacatggttaatatttttggctttgtgagttgtatagttttcgttgtagctgttcagctctgctacatgaagcaaccatagaccataccttaacaagtggtcacttttgagtaccaataaaactttatttagaaataacagagggctggatttggtcctagtttgctgaacccttttctagatgaaggctcctcttgccaagactggctccctaccttggctgacaaattctcactttgggacttagtcattgttgctgctctctgttattttgcatgtcttttctcatgtttaggtgctgtgtcttaatacttttttcttacatttaatttaacaatcattactgagcgctggtatgtctagtttcttttctcttctttcctccttttcttttctttttttctttttctttatttgaaggctctcactctgtcactccagcctgggtggcagaccaggaccctgtctctaaaaaaaaaaaaaaaaaaaaaa

SEQ ID NO: 378 - DNA, 1707 bp, Homo sapiens
ccacgcgtccgggcctgagtcctctgacctctattcagaaatccctgccctgacccgctgtgccaaggttagcacctgccagaatcaaccaaggccggacaaggcatgaggagcgctgcttcctgggcctggctcctcccccttctccccatttgggctgctgtgccagggcttgctccagccacctgggtgtgagctatgccctctgccagaaatgctctttcctctattggcctggccacacctactcagtctttgggtctgtttaactgccacttcccccagtaaaccttctgctccccattcacatcagatggacttgtgtctcttgcactagtctatgagatttggatgtctgtgtccttagggcccaagctggccactctggcccagaagcagcctcgggccatgtcttgtctacagggtgtggggggacagtatgtgcacccccttgctttctcaggtggactttgaacagctgactgagaacctggggcagctggagcgccggagccgggcagccgaggagagcctgcggacttggccaagcatgagctggccccagccctgcgtgcccgcctcacccacttcctggaccagtgtgcccgcgcgtgttgccatgctaaggatagtgcaccgccgtgtctgcaataggttccatgccttcctgctctacctgggctacaccccgcaggcggcccgtgaagtgcgcatcatgcagttctgccacacgctgcgggaatttgcgcttgagtatcggacttgccgggaacgagtgctacagcagcagcagaagcaggccacataccgtgagcgcaacaagacccggggacgcatgatcaccgaggtgggtgcccttccaggtcttagtcttgactgccacctccttggtttccttcgctcctcccagctcacccttcttctttctccagacagagaagttctcaggtgtggctggggaagcccccagcaacccctctgtcccagtagcagtgagcagcgggccaggccggggagatgctgacagtcatgctagtatgaagagtctgctgaccagcaggcctgaggacaccacacacaatcgccgcagcagaggcatggtccagagcagctccccaatcatgcccacagtggggccctccactgcatccccagaagaacccccaggctccagtttacccagtgatacatcagatgagatcatggaccttctggtgcagtcagtgaccaagagcagtcctcgtgccttagctgctagggaacgcaagcgttcccgcggcaaccgcaagtcttgtaagtaaccccccacaatcccactgcccacctgaaccccatcaaccccctccaaccctgctctgtccctgcagtgagaaggacgttgaagagtgggctcggagatgacctggtgcaggcactgggactaagcaagggtcctggcctggaggtgtgaaggtgctgtatcccggaaatctatctggaccctggactgcagtgcaggagatgacagagtgaggagggcccagagcagaattctggccccagaactctgtgcccaggagccatgccttgagcagtattagccgtgtgtgtatgcatgtgagtgtgtgtgtatgtgtgtgtgtgcatgcatatgcatgtgcatgtgtgtgagctccttgaacgcacggagcaaaataaaattttcttagctaatccaaaaaaaaaaaa

SEQ ID NO: 379 - DNA, 1239 bp, Homo sapiens
cccacgcgtccgcccacgcgtccgcccacgcgtccggctgcggcgcgatggcggcggggctggcgcggctcctgttgctcctcgggctctcggccggcgggcccgcgccggcaggtgcagcgaagatgaaggtggtggaggagcccaacgcgtttggggtgaacaacccgttcttgcctcaggccagtcgcctccaggccaagagggatccttcacccgtgtctggacccgtgcatctcttccgactctcgggcaagtgcttcagcctggtggagtccacgtacaagtatgagttctgcccgttccacaacgtgacccagcacgagcagaccttccgctggaacgcctacagtgggatcctcggcatctggcacgagtgggagatcgccaacaacaccttcacgggcatgtggatgagggacggtgacgcctgccgttcccggagccggcagagcaaggtggagctggcgtgtggaaaaagcaaccggctggcccatgtgtccgagccgagcacctgcgtctacgcgctgacgttcgagacccccctcgtctgccacccccacgccttgctagtgtacccaaccctgccagaggccctgcagcggcagtgggaccaggtagagcaggacctggccgatgagctgatcaccccccagggccatgagaagttgctgaggacactttttgaggatgctggctacttaaagaccccagaagaaaatgaacccacccagctggagggaggtcctgacagcttggggtttgagaccctggaaaactgcaggaaggctcataaagaactctcaaaggagatcaaaaggctgaaaggtttgctcacccagcacggcatcccctacacgaggcccacagaaacttccaacttggagcacttgggccacgagacgcccagagccaagtctccagagcagctgcggggtgacccaggactgcgtgggagtttgtgaccttgtggtgggagagcagaggtggacgcggccgagagccctacagagaagctggctggtaggacccgcagggaccagctgaccaggcttgtgctcagagaagcagacaaaacaaagattcsaggttttaattaattcccatactgataaaaataactccatgaattctgtaaaccattgcataaatgctatagtgtaaaaaaatttaaacaagtgttaactttaaacagttcgctacaagtaaatgattataaatactaaaaaaaaaaaaaaa

SEQ ID NO: 380 - DNA, 738 bp, Homo sapiens
  misc_feature (646)..(646): n equals a,t,g, or c
  misc_feature (670)..(670): n equals a,t,g, or c
  misc_feature (696)..(696): n equals a,t,g, or c
  misc_feature (707)..(707): n equals a,t,g, or c
  misc_feature (718)..(718): n equals a,t,g, or c
catcagaccacacccagcagtcagaaaagaggtgcaggggcccgggctgggacagtgaagagtgctgggcagtctgtggtcctctgtatctcaactttttcatcttaaaaaaacaaatagggttgtgtgtgtggctggtggtcataaggtcctttctggctctaataacctgagcttctgttatgaagctgggacccttagagcctcaggatgatcctctgtttgtttgtgaagccccaatcaggtgctaagcaccatagtggcacttagctgaagctcctctgtaactcctgtgggccctgccttgcccacccccgacagctgctgcagtgctcctgagcagcacaggcctgatggagcttctggagaagatgctggccctcaccttggcaaaggcagattctcccaggactgcactcctctgctctgcctggctgctcactgcctccttctctgcccagcagcacaagggcagtttgcaggttcaccagacactctctgtggaaatggaccargtattgaaggctctcagctttccaaagaaaaaggctgcactactctcaactgccatcttatgcttcctgcggacagccctgcgacaaagcttttcctctgcctggaaccctggtgcccttaagggcccagncactgcagccaccaaggacactgncctaacttcactgcgaatgtccaagnccggccctggncattgggctgnaaaaacctcctggtgcaaaa

SEQ ID NO: 381 - DNA, 935 bp, Homo sapiens
  misc_feature (6)..(6): n equals a,t,g, or c
  misc_feature (14)..(14): n equals a,t,g, or c
  misc_feature (16)..(16): n equals a,t,g, or c
  misc_feature (50)..(50): n equals a,t,g, or c
  misc_feature (95)..(95): n equals a,t,g, or c
  misc_feature (101)..(101): n equals a,t,g, or c
  misc_feature (139)..(139): n equals a,t,g, or c
  misc_feature (176)..(176): n equals a,t,g, or c
ggccancttttttntnggggaaaaaatgggacccaaaagttatttgaaangggctttttcaagctttttcccaaaaggaaaaaaagggttgccantaattnttcaaggattgcccatctttaatgctttccttgggganaagccttgcgacaaaagctttttccttctgccctggnagccctggtgccttcaggggcccagccactgccagccaccaaggacactgtcctagctccactgcgaatgtcgcaagtccggtccctggtcattgggctgcagaacctcctggtgcagaaggaccctctattgtcccaggcctgtgttggctgcctggaggccttgcttgactacctggatgcccggagcccagacattgctctccacgtggcctcccagccttggaatcggtttttgctgtttaccctcttggatgctggagagaattccttcctcagacctgagattttgaggctcatgaccctgtttatgcggtaccggagtagcagtgtcctctctcatgaagaggtgggtgatgttctgcaaggtgtggctttggctgacctgtctaccctctcgaacaccacactccaggccctgcatggcttcttccagcagctccagagcatgggacacctggctgaccacagcatggcccagaccctgcaggcctccttggagggccttccccctagcacctcctcaggccagccacccctgcaggacatgctctgcctgggaggggtggctgtatccctgtcccacatcagaaactgatcctcaggacttgaaggcccagaagtggagagagaatgagacctggagacaaagggcataattgttggggaaatggatgacagctgaagctattcatatggagccatatactctattgttgaaatagaataaggaaataaaatgatacactcacaaaaaaa

SEQ ID NO: 382 - DNA, 871 bp, Homo sapiens
ggcacgagggaacccagaagatgctgcctctcctgatcatctgtctcctgcctgccattgaagggaagaactgcctccgctgctggccagaactgtctgccttgatagactatgacctgcagatcctctgggtgaccccagggccacccacagaactttctcaaagtattcactccttgttcctagaggataataattttctcaaaccctggtaccttgatcgtgaccatttggaagaagaaacagccaaattcttcactcaagtacaccaagccattaaaacgttacgagatgataaaacagtacttctggaagagatctacacgcacaagaatctctttactgagaggctgaataagatatctgatgggctgaaggagaaggagccccacccctctccatgaatgccttcccggctccatctcctacttgcaccccagaaccccttggcttctgtctgcctccccagcacctcagtttctctaccttctcaccctccctggcagcctgcaatgagtcctgtgccaggaaccggcggacctccctgtgggctgtgagtctcagcagtgctctactcctggccatagctggagatgtttcttttactggcaaaggaagaaggaggcagtaaaggaacagggcagcccgcatgtcttccagaagtgaacagaggccgcagctaccaccgtcacaaagttcactcatctctgggtcccggtgaccccatccccccataccctccatcctgggtcctggggccccaaagctctgaggcctaggagactgcgctgtctcgtggtttgcctactcctacacctttgtaaagagtctcttcattaaaacccctcttcataaaaaaaaaaaaaaaaaa

SEQ ID NO: 383 - DNA, 881 bp, Homo sapiens
gaattcggcacgagggaacccagaagatgctgcctctcctgatcatctgtctcctgcctgccattgaagggaagaactgcctccgctgctggccagaactgtctgccttgatagactatgacctgcagatcctctgggtgaccccagggccacccacagaactttctcaaagtattcactccttgttcctagaggataataattttctcaaaccctggtaccttgatcgtgaccatttggaagaagaaacagccaaattcttcactcaagtacaccaagccattaaaacgttacgagatgataaaacagtacttctggaagagatctacacgcacaagaatctctttactgagaggctgaataagatatctgatgggctgaaggagaagggagccccacccytctccatgaatgccttcccggctccatctcctacttgcaccccagaaccccttggctctgtctgcctccccagcacctcagtttctctaccttctcacctccctggcagcctgcaatgagtcctgtgccaggaaccggcggacctccctgtgggctgtgagtctcagcagtgctctactcctggccatagctggagatgtttcttttactggcaaaggaagaaggaggcagtaaaggaacagggcagcccgcatgtcttccagaagtgaacagaggccgcagctaccaccgtcacaaagttcactcatctctgggtcccggtgaccccatccccccataccctccatcctgggtcctggggccccaaagctctgaggcctaggagactgcgctgtctcgtggtttgcctactcctacacctttgtaaagagtctcttcattaaaacccctcttcataaaaaaaaaaaaaaaaaactcga

SEQ ID NO: 384 - DNA, 1147 bp, Homo sapiens
ggcacgagacccattgagcagaaggaggccaggtgggaaagctcctgggaagagcagccagactggacactgggctgcttgagtcctgagtcacaattcagaattcctgggctccctgggtgcattctatcattccagttgaaagtttgcttccttccagtcatgtggctcttcattctactctccttggctctcatttcagatgccatggtcatggatgaaaaggtcaagagaagctttgtgctggacacggcttctgccatctgcaactacaatgcccactacaagaatcaccccaaatactggtgccgaggctatttccgtgactactgcaacatcatcgccttctcccctaacagcaccaatcatgtggccctgaaggacacagggaaccagctcattgtcactatgtcctgcctgaacaaagaagacacgggctggtactggtgtggcatccagcgggactttgccagggatgacatggattttacagagctgattgtaactgacgacaaaggaacctggccaatgactttggtctgggaaagactatcaggcacaaaaccagaagctgcaaggctcccaaagttgtccgcaaggctgaccgctccaggacgtccattctcatcatttgcatactgatcacgggtttgggaatcatctctgtaatcagtcatttgaccaaaaggaggagaagtcaaaggaatagaagggtaggcaacactttgaagcccttctcgcgtgtcctgactccaaaggaaatggctcctactgaacagatgtgactgaagatttttttaatttagttcataaagtgatgctacaacagaataatcaccatgacaactggccccacacctcagagactgattctgatctcccaggaattctgaaggtccctctatccttgacaacaatcatttgcagccaggtagcaacggcagtagtcagaggagctatgatagaccacacccaagcaaggctgccctcaaataacatctcaagatcttagttcttatgcattccatcagtcagaagtgaagaagaggtggagaatctggattggggaccaggaaatcacttgtattttgttagccaataaattcctagccagtgttgaatgaaaaaaaaaaaaaaaaaaaaaaaa

SEQ ID NO: 385 - DNA, 1134 bp, Homo sapiens
  misc_feature (418)..(418): n equals a,t,g, or c
  misc_feature (803)..(803): n equals a,t,g, or c
  misc_feature (816)..(816): n equals a,t,g, or c
acccattgagcagaaggaggccaggtgggaaagctcctgggaagagcagccagactggacactgggctgcttgagtcctgagtcacaattcagaattcctgggctccctgggtgcattctatcattccagttgaaagtttgcttccttccagtcatgtggctcttcattctactctccttggctctcatttcagatgccatggtcatggatgaaaaggtcaagagaagtttgtgctggacacggcttctgccatctgcaactacaatgcccaytacaagaatcaccccaaatactggtgccgaggytatttccgtgaytactgcaacatcatcgccttctcccctaacagcaccaatcatgtggccctgaaggacacagggaaccagctcattgtcactatgtcctgcctgaacaaanaagacacgggctggtactggtgtggcatccarcgggactttgcmagggatgacatggattttacagagctgattgtaactgacgacaaaggaaccctggccaatgacttttggtctgggaaagacctatcaggcaacaaaaccagaagctgcaaggctcccaaagttgtccgcaagctgaccgctccaggacgtccattctcatcatttgcatactgatcacgggtttgggaatcatctctgtaatcagtcatttgaccaaaaggaggagaagtcaaaggaatagaagggtaggcaacactttgaagcccttctcgcgtgtcctgactccaaaggaaatggctcctactgaacagatgtgactgaagwtttttttaatttagttncataaagtgatgnctacaacagawtaatcacccatgacaactggccccacacctcagagactgattctgatctcccaggaattctgaaggaccctctatccttgacaacaatcatttgcagccaggtagcaacggcrgtagtcagaggagctatgatagaccacacccaagcaaggctgccctcaaataacatctcaagatcttagttcttatgcattccatcagtcagaagtgaagaagaggtggagaatctkgattggggaccaggaaatcacttgtattttgttagccaataaattcctagccagtgttgaatgaaaaaaaaaaaaaa

SEQ ID NO: 386 - DNA, 1598 bp, Homo sapiens
  misc_feature (1067)..(1067): n equals a,t,g, or c
  misc_feature (1069)..(1069): n equals a,t,g, or c
  misc_feature (1577)..(1577): n equals a,t,g, or c
aggaaagaacaaaggttatttcctggagaaaagacaatttattcaacaccaacragggactcatcatatgggcacaactctggtgtccttctatggagaaaacctcaagtaaagttttattctgcctttraaaatgcttccaaaagtagaccctgtccccacacaggtcaagactacagagaaggctttgtagaaatgtgtcacctatgtacacctgctacttacacatttcctcttttggaaaaatgagatacttagaataacargaaaattaagacatactggcctggtgccagcagatggcttttctatagacaaactaggttagtgtggaagatataggttaaaataaactatgctgttttatttatcttcccaacctgattggcagctagacttttttagggtctcatttaatggccctgtttttttcattattatatttaatgatagggcaggatttcgtatgcaagctcttgtttctcaggctgcctgcagaagaagtcgctataaattatctgttgtctacatggtacaaggcccattgactcatctgatgcttgttttgttaatttctttaatatttttatcacggggcagtgggagggcttgggcttttagccacagctgttttaagacttctgatctcctgccctgcaggaataggtgggaagtcattgaatttttacactatagtaatttgcattcccacataagtttgagtgttacgaaaacattcctttaaagggatctgtgctacacaaaatatgccaggacctcacagacaaagccattgctagaaatgtcattccaatgatcagatctggaaacaggctgccataaccacttttccttcttgtagactcagctcacctgtatatttaaactgttcttggcatcttgaaacacctatttctactcaggtactcattgtcctgttactgattcacctttctgatccttttcaaccagttttcccccaaggggggaaattttacttaacctctagtatttgaacaactcaatatttgaattgttgccccatttgcttttacctgtactgtatncntggtcatctcaaatggcgtctaaacccagctactttgcattccagaagtttccattccctccaattccacctaatttttcatctgtcctagttactggctctttcttcatgtcttatttctcttgctttgggagcttaaaagattttacaagacctaattttgggttccttccttggagccatagttaccctgccaagaagagtagaaaatgggttcaactcctgtttcgctccaccaacacctctgtgagtctcatcatcagctgagcgatgatgccttacaggttgcatagcactggaactttcctagagtaacggctctgctgccagggtttctctgggctcattcttccactgacttaattatgatctatgcctaacagagccccagtacaactattttgcagaatggctgttaccctagaattactatagcacatattgagatatagttgtactccctagtagataggaactgaccccaacaataaactttgataataaaganaaaaaaaaaaaaaactcgtag

SEQ ID NO: 387 - DNA, 530 bp, Homo sapiens
  misc_feature (517)..(517): n equals a,t,g, or c
gcctggcagagagactctgaaatgagggattagaggtgttcaaggagcaagagcttcagcctgaagacaagggagcagtccctgaagacgcttctactgagaggtctgccatggcctctcttggcctccaacttgtgggctacatcctaggccttctggggcttttgggcacactggttgccatgctgctccccagctggaaaacaagttcttatgtcggtgccagcattgtgacagcagttggcttctccaagggcctctggatggaatgtgccacacacagcacaggcatcacccagtgtgacatctatagcacccttctgggcctgcccgctgacatccaggctgcccaggccatgatggtgacatccagtgcaatctcctccctggcctgcattatctctgtggtgggcatgagatgcacagtcttctgccaggaatcccgagccaaagacagagtggcggtagcaggtggagtctttttcatccttggaagcctcctgggattcattcctgntgcctggaatctt

SEQ ID NO: 388 - DNA, 1046 bp, Homo sapiens
  misc_feature (14)..(14): n equals a,t,g, or c
  misc_feature (33)..(33): n equals a,t,g, or c
  misc_feature (441)..(441): n equals a,t,g, or c
  misc_feature (460)..(460): n equals a,t,g, or c
gagaagtcagcctngcagagagactctgaaatnagggattagaggtgttcaaggagcaagagcttcagcctgcaagacaagggagcagtccctgaagacgcttctactcaccactggtgcctgacagcatgaaatttgagattggagaggctctttacttgggcattatttcttccctgttctccctgatakctggaatcatcctctgcttttcctgctcatsccagagaaatcgctccaactactacgatgcctaccaagcccaacctcttgccacaaggagctctccaaggcctggtcaacctcccaaagtcaagagtgagttcaattcctacagcytgacagggtatgtgtgaagaaccaggggccagarctgggggktggctgggtctgtgaaaaacagtggacagcaccccgaggccacaggtgagggacattacnactggatcgtgtcagaagntgctgctgaggatagactgactttggccattggattgagcaaaggcagaaatgggggctagtgtaacagcatgcaggttgaattgccaaggatgctcgccatgccagcctttctgttttcctcaccttgctgstcccctgccctaagtccccaaccctcaacttgaaaccccattcccttaagccaggactcagaggatccctttgccctctggtttacctgggactccatccccaaacccactaatcacatcccactgactgaccctctgtgatcaaagaccctctctctggctgaggttggctcttagctcattgctggggatgggaaggagaagcagtggcttttgtgggcattgctctaacctacttctcaagcttccctccaaagaaactgattggccctggaacctccatcccactcttgttatgactccacagtgtccagactaatttgtgcatgaactgaaataaaaccatcctacggtatccagggaacagaaagcaggatgcaggatgggaggacaggaaggcagcctgggacatttaaaaaaaaaaaaaaaaaaactcgagggggggcccggtac

SEQ ID NO: 389 - DNA, 819 bp, Homo sapiens
  misc_feature (786)..(786): n equals a,t,g, or c
  misc_feature (819)..(819): n equals a,t,g, or c
aattcggcacgagctcaaagagtaagaatccaagtgtgtgacattacatagctttgcatctatggaaacctaaatcataattgtttccactgcccaattatgttccttttcataacatttactattctggctatatttatcatagaacctaggaaccttagagttgacctgaatctaattaaatttcagacctcctggccaaagaccctagtggaagagcaaaactaaatcaacatattaccaatctcaagtatttctctgaggacccagaccactgactttttgttgtcattttcaggttgatcctataactgtatgttctacaatatctgtgctccaccagctcagtgaggaatcaacggaatatcaaaagtaaatattggtcaccatataccttttggtactagtctacgaaataattggctgaggaactgtttcatattaaagaaaagctaaaagcaatgtgtgatcttagattagacctatgattggaatgtatgtatattttatatacaaaatattgaggaaattgacaaaatttaaatacagaatatggattagataataggaatgtatcaaggtcaatatttaaaaagataatttcaacttttattttattcagtgggtacatgtgcagactttgttttacatagtacccaacagtttttcaacgcttatcccccaccctctagtaatctgcagwgwctattattgycatcttcgtggctattgtacatgggatccatacttgattttgctctcaacatgaacattattggtgtaganaaatgccactaagttttkgtacgttggcttttn

SEQ ID NO: 390 - DNA, 501 bp, Homo sapiens
  misc_feature (1)..(2): n equals a,t,g, or c
  misc_feature (12)..(12): n equals a,t,g, or c
nnccccccaatnatatttttccaaattaattccaacataggaaggattccaccttcctagtatgttttcaaattgtttcaaacctgacctctttttgattgctctaccttccaaaagaaaagaagggaacactaattttcttycctgatttacttcattgttttcttctgttagattaactttacctataaaagattgtctcttgactttatatatatatatatgtgtgtgtgtgtgtgtgtgtgtgtgtgtgtgtgtgtgtgtgtgtatttgaagaggacatgtgcctccataaaaggaaataaaatgagagaatacattattgattttgtgaaatcaaaatatttgaattatggtttctcaatattcaaaaactcttgcagtttctgtacttatttcttctgatgcatagagtttcggggactacatatgtttcacaaccaaagatatccacttgaaataaaaacattataaagttaaaaaaaaaaaaaaaaactcgag

SEQ ID NO: 391 - DNA, 675 bp, Homo sapiens; identical to SEQ ID NO: 246

SEQ ID NO: 392 - DNA, 884 bp, Homo sapiens
  misc_feature (873)..(873): n equals a,t,g, or c
ggccgacgcctggggtgtggagctgccccaccgccaccccgtgggcgagtggatcaagaagaaaaaacctggcccgagagtcgaagggccgccccaggccaacagaaatcacccggccttacctctgtccccacccttaccttcccccacataccgccccctgcttgggttcccaccccagcgcttgccgctgctcccgctcctgtccccacagcctcctcctcccattctccatcaccagggaatgccccggttcccacagggtcccccagatgcctgtttttcctcagaccatactttccagtcggatcaattctattgccattcagatgtcccctcatcagcccatgcaggtttcttcgtcgaagacaattttatggttggtcctcagctgcctatgcccttcttccccacaccccgttatcagcggcctgccccagtggtacataggggttttggcaggtatcgtccccgtggcccctatacgccctggggacagcggcctcgaccttcaaagagaagggccccagccaatcctgagccaaggcctcaatagacggacctaggccttatttcctctttatgaacatggattggacagatctgacacttcctttccattgcttggcctgaacagactgaccttgttaacttaagcctggagtccatgcctcgtcttccttttgttcattgctgttaccaagaaagccaaggaagagcagcctgactcattcttcttggctgcagcctcttccccacttcctgggagtgacccagcgttattcctgcctcctcactcctattctctttgcctttgtgtaaaaataaaatggaaataaacaagttgcacagaaaaaaaaaaaaaaaaaaaancccaagggggg

SEQ ID NO: 393 - DNA, 3306 bp, Homo sapiens
ccacgcgtccggcccagggctgtctgtctccaaagcccaaccataactcacatccccattccagctcctctgggtgagtctgttccccctcagcctcactttccttatcctgtcaaatgaaggatttggaatgacttaagttattcaagcaacaaacacttactgaattgtcttgccacttccagggtgacattatggagttctgtgattctgcaagaggccagaggggacaaggtcaagtgggtgttcacctggcccctcatcttcctcctgtgcgtcaccattcccaactgcagcaagccccgctgggagaagttcttcatggtcaccttcatcaacgccacgctgtggatcgctgtgttctcctacatcatggtgtggctggtgactattatcggatacacacttgggatcccggatgtcatcatgggcattactttcctggcagcaggacaagtgttccagactgcatggccagcctaattgtggcgagacaaggccttggggacatggcagtctccaacaccatagaagcaacgtgtttgacatcctggtaggacttggtgtaccgtggggcctgcagaccatggttgttaattatggatcaacagtgaagatcaacagccgggggctggtctattccgtggtcctgttgctgggctctgtcgctctcaccgtcctcggcatccacctaaacaagtggcgactggaccggaagctgggtgtctacgtgctggttctctacgccatcttcttgtgcttctccataatgatagagtttaacgtctttaccttcgtcaacttgccgatgtgccgggaagacgattagcgctgagtcgcggcccctgggagctgatctggacaccctgtgacactggcgtcctcctctcccctccttcccccaccacaggtctctcctgcataggcagccactgtccgttctttcacacactggaaggaagagccatcgtggtctttgtctggccacagccaagctgctgggcatcctcctcctccttggagttccacccctgcaaggctggatttgggggccattatctgagcagcttcaaagacccctgagctgccaaccacggagatgtgccaagcatctcatctctcctgcacactttagtcagaaggacttctgcatgcagtttgtctttctgttctgcaggcagcttcagaattgaggtcatttgtgagcacaagatctcatagggcaggtgcaaaataggaatgttgttctcaagtgtcacctccagcccagaggtggttccttaggcagcatgtgctcctgggagcctctgacttttgctggaagcacccacagtttggaaggggcaagacctcaacctgttggggtttagggcccatgatggcagacattctaccccttttcctggaaaaactggaagaatgaaaataatttttttctgtggaagagagaaaatgagtgaatattcttctcacttttattgatgcattcagagaataagcaatgaaatattaaaaaatgaaacatcatataggtcatcatacttgaaaattatcattccatatgaaaggatcatgatacacaccaaaaaagtaatgatcgtaaagacacaaatcctctgtatgccatcttgcattggcactgaggtgtttggtttggaatagggaaaaagagacaggatctcgctgtgttccccaggtaggtcttgaactcctggcctcaagtgatcctcctgccttgacctcccaaagtgctggattacaagcgtgagcccctgcacccggcccaagcagttgcttctttttttctctttttttttttttttgagatggagcctcactctgttgcccaggctggagtgcagtggcgcgatctccactcactgcaagctccgcctcccgggttcatgccattctcctgcctcagcctcccgagtagctgggactacaggcgcctgccaccacacccagctaattttttgtatttttggtacagacagggtttcaccgtgttagccaggatggtcttgatctctgatctcggatccgccaccccggcctccaaagtgctggattacaagcgtgagccaccgggccccgccaagcagttgcttcttatgcaacatgttgggtgggacttgtccacgggccaggccaataaaattcttaatcctgcagagagcagtaccctcatcaccccatcactggaaaacaaatgtttaagctatcaagagagggaatgtgcagcttggttctagatgcatggtttggaggatctaccttggcctaaagggaatgtcccaaacaacagagccttctttgctgcactccagaattctctacacagaatttcccaagtccattcaggacagacgcgcagtcctctttcaatggaagaagagaggacttttcccctcctgaaaaatgactggagtgtgaacaaggcagctctgtttttctaaataagttgttcttgtgagttttttctggccactgggcatctctgccctcacttttcatccctgccctctaagctgcagaccccatgaccacactgtctgcttccttgagcttcccgcacgaggcttgcacctgggggacctggagaccctgcggacagaactgtggctgagccactgtggccaactcttggggagctccacagtgggggttgctggtctgtgaggctgagtctccatttcagagcacacactccctggcagggcgcctccgcctgtgtctcctgcccagcagccgccagcagggaatagttgctggtgtctgagcacaaagagagctttgattacctagagaggaaaaaggctgtcagccagatgcagccaggcccaggggtagatacaggagttgctaaggaaggggccgagccaggagaggccaggcagatccacaaagcccaaggggatgcaggctgggtgtggtttctgagggaacctaccaaatagcaggtagatggaatcagaggactcttgtgtcctgaaagaacctccttaaaaacaactaaaaccaagaacttctggggctgttcacacattgttcaagtcaccccaagatcgttctggcacgctgagctgaacaccaccatctttgttcattctctctctaatgggcaaagcaggatcatcgagttgaaaagttgtaaataatgaggatatttatcccgctatttattttttcaataactgtgacctcctgcactgtgaatgctctgtgacatgagattcttagtttaataaaactgtcattaaatttgaaaaaaaaaaaaaaaaaaaaaaaaaaaaaaaaaaaaaa

SEQ ID NO: 394 - DNA, 2194 bp, Homo sapiens
  misc_feature (441)..(441): n equals a,t,g, or c
  misc_feature (987)..(987): n equals a,t,g, or c
  misc_feature (2034)..(2034): n equals a,t,g, or c
  misc_feature (2041)..(2041): n equals a,t,g, or c
  misc_feature (2121)..(2121): n equals a,t,g, or c
  misc_feature (2169)..(2169): n equals a,t,g, or c
  misc_feature (2184)..(2184): n equals a,t,g, or c
ggcccagggctgtctgtctccaaagcccaaccataactcacatccccattccagctcctctgggtgagtctgttccccctcagcctcactttccttatcctgtcaaatgaaggatttggaatgacttaagttattcaagcaacaaacacttactgaattgtcttgccacttccagggtgacattatggagttctgtgattctgcaagaggccagaggggacaaggtcaagtgggtgttcacctggcccctcatcttcctcctgtgcgtcaccattcccaactgcagcaagccccgctgggagaagttcttcatggtcaccttcatcamcgccacgctgtggatcgctgtgttctcctacatcatggtgtggctggtgactattatcggatacacacttgggatcccggatgtcatcatgggcattamtttcctggcagcanggacaagtgttccagactgcatggccagcctaattgtggcgagacaaggccttggggacatggcagtctccaacacyataaraagcaacgtgtttgacatcctggtaggacttggtgtaccgtggggcctgcagaccatggttgttaattatggatcaacagtgaagatcaacagccgggggctggtctattccgtggtcctgttgctgggctctgtcgctctcaccgtcctcggcatccacctaaacaagtggcgactggaccggaagctgggtgtctacgtgctggttctctacgccatcttcttgtgcttctccataatgatagagtttaacgtctttaccttcgtcaacttgccgatgtgccgggaagacgattagcgctgagtcgcggcccctgggagctgatctggacaccctgtgacactggcgtcctcctctcccctccttcccccaccacaggtctctcctgcataggcagccactgtccgttctttcacacactggaaggaagagccatcgtggtctttgtctggccacaggccangctgctgggcatcctcctcctccttggagttccacccctgsaaggcygatttgggggccattatctgagcagcttcaaagacccctgarctgccaaccacggagatgtgccaagcatctcatctctcctgcacactttagtcagaaggacttctgcatgcagtttgtctttctgttctgcaggcagcttcagaattgaggtcatttgtgagcacaagatctcatagggcaggtgcaaaataggaatgttgttctcaagtgtcacctccagcccagaggtggttccttaggcagcatgtgctcctgggagcctctgacttttgctggaagcacccacagtttggaaggggcaagacctcaacctgttggggtttagggcccatgatggcagacattctaccccttttcctggaaaaactggaagaatgaaaatmatttttttctgtggaagagagaaaatgagtgaatatycttctcacttttattgatgcattcagagaataagcaatgaaatattaaaaaatgaaacatcatataggtcatcatacttgaaaattatcattccatatgaaaggatcatgatacacaccaaaaaagtaatgatcgtaaagacacaaatcctctgtatgccatcttgcattggcactgaggtgtttggtttggaatagggaaaaagagacaggatctcgctgtgttccccaggtaggtcttgaactcctggcctcaagtgatcctcctgccttgacctcccaaagtgctggattacaagcgtgagcccctgcacccggcgccaagcagttgcttctttttttctctttttttttttttttgagatggagcctcactctgttgcccaggctggagtgcagtggcgcgatctccactcactgcaagctccgcctcccgggttcatgccattctcctgcctcagcctcccgagtagctgggactacaggcgcctgccaccacacccagctaattttttgtatttttggtacagacagggtttcaccgtgttagccaggatggtcttgatctctgatctcgngatccgnccaccccggccttccaaagtgcttggattacaagcgtgagccacccgggccccgccaagcaagttgcttcttatgcaacnatgttgggttggggacttggtccacggggcccaggcccaataaaaatnctttaatccctgcanaagaggccag

SEQ ID NO: 395 - DNA, 1138 bp, Homo sapiens
gggcgcctgtagtcccagctattcaggaggccgaggcaggagaattgcctgaactcaggaggcggasttgcagtgagccgagatcgcgccattgcactccagcctgggtgacagagtgagactctttctcccaaaaaaaaaaaaaaaaaaaaagtcaaatgcagctgggaatgtggttcgtgcctttttgtatattaaccatttgaaacttggttgtaaggtggggttggcaatgtcaggcctggctgcagcagctcatgtctttagagtgtgcctcttccctctctcgtggggctcgagcaagactaccttcatacatgggctctccagttacatagcaactccagtgttaaattccatcttttcttcctggaaaagccgtagaaaggacacctggacatgcctgctgcacaggttgtctgccttccccatcagccscagaaggaggaactttgctctcttctctcacagctgtgtgtgcataagaagtagttcggatgatgtgggtcccaccatgtattccttctctgttccatgtagagtaaaataaatgggagttctgtttaatgcatcacctcggttcatattgcatttgccaagaaagtgcaattttattgaacattaggattgaattcttaactgagtaatcaatttcagtagtaagttaaaatgccttctattaatggacaactgcaaccgttaatcagagttacagtagattaacagttgtcagcatttatgctaatagcactaataaaccgtgggctcatgatttgcactttataattccatatttctcaaaacagttggtaatactttttgcttgaaggtattgattcttttgtccctttgcttgctacttggagatgtagagaaagctaaatgacattttcacggtgatgacacaatatcaccttctgcttttgcacacttggctttgtgtcaaaatagatggaaagggttcatttgttctggtgctctactgtttaatttgatctggtgtgtgactaaagcaagacaaatagtatttttaatgaaaccatttaataacctctggtagcttagagtcgaaggcattggaaaaatgcaattaaaggatgcctagatgtaaacaaaaaaaaaaaaaaagggcggccgc

SEQ ID NO: 396 - DNA, 3599 bp, Homo sapiens
  misc_feature (2675)..(2675): n equals a,t,g, or c
gggagggcaacggggcggcgcgggcggccgggcgcagggtckcgggargtgacrcgcggcgaggatggcggcgcggggccgggggctgctgctgctgacgctgtcggtgctgttggcggcgggcccctccgccgctgcggycaagctcaacatccccaaagtgctgctgcccttcacrcgggccacgcgcgttaacttcacgctggaggcctcggagggctgctaccgctggttgtccacccggccggaggtggccagcatcgagccgctgggcctggacgagcagcagtgctcccagaaggcagtggtgcaggcccgcctgacccagcctgcccgcctcaccagcatcatcttcgcagaggacatcaccacaggccaggtcctgcgctgtgatgccattgtggacctcatccatgacatccagatcgtctccaccacccgcgagctctacctggaggactcccccctggagctgaagatccaggccctggactccgaagggaacaccttcagcactctggctggactggtcttcgagtggacgattgtgaaggactccgaggcggacaggttctcagactcccacaatgcgctgcgaatcctcactttcttggagtctacgtacatccctccttcttacatctcagagatggagaaggctgccaagcaaggggacaccatcctggtgtctgggatgaagaccgggagctycaagctcaaggctcgcatccaggaggctgtctacaagaatgtacgccctgcakaagtcaggctgctgattttggaaaacatccttctgaacccggcctatgacgtctacctgatggtgggaacctccattcactacaaggtgcagaagatcaggcaagggaaaattacagaactctycatgccttccgatcagtacgagttgcagcttcagaacagcatcccgggccccgaaggagacccaacccggccggtggctgtcttggcccaggacacgtcgatggtcactgcactgcagctgggacagagcagcctcgtccttggccacaggagtattcgcatgcaaggtgcttctaggttacccaacagcactatctacgtggtcgaacctggatacctagggttcactgttcaccctggtgacaggtgggtgctggagaccggccgcctgtatgaaatcaccatcgaagtttttgacaagttcagcaacaaggtctatgtatctgacaacatccgaattgaaactgtgcttcctgctgagttcttcgaggtgctctcgtcctcccagaatgggtcataccatcgcatcagggcactaaagaggggacagacggccattgacgcggccctcacctctgtggtggaccaggatggaggggtccacatactacaggtgcctgtgtggaaccagcaggaggtggaaattcacatcccgatcaccctgtatcccagcatcttgacatttccgtggcaaccaaagacgggcgcctatcagtacacaataagggcccacggtggcagtgggaacttcagctggtcttcgtcaagccacctggttgccacagttactgtcaagggcgtgatgaccacaggcagtgacatcgggttcagtgtgatccaggcacatgatgtgcagaacccactccatttcggtgagatgaaggtgtatgtgatcgagccccacagcatggagtttgccccgtgccaggtggaggcacgtgtgggccaggccctggagctgcccctgaggatcagtggcctcatgcccggcggggccagtgaggtggtcaccttgagcgactgctcccactttgacttggctgtcgaggtggagaaccagggtgtgttccagccactcccagggaggctgccgccaggctctgagcactgcagcggcgtccgggtaaaggccgaggcccagggctctaccacgcttcttgtgagctacagacacggccacgtccacctgagtgccaagatcaccattgctgcctacctgcccctcaaggctgtggatccctcctctgttgccttggtaaccctgggctcctcaaaggagatgctgtttgaaggaggtcccagaccttggatcctcgagccgtccaaattcttccagaacgtcaccgctgaggacactgacagcatcggcctggctctctttgccccccattcctcccggaattatcagcaacactggatccttgtgacctgtcaggccttgggtgagcaggtcatcgccctgtcggtggggaacaagcccagcctcaccaacccctttcctgcggtggagcctgccgtggtgaagttcgtctgcgccccaccgtccaggctcaccctcgtgcctgtctacaccagcccccagctggacatgtcctgtccgctgctgcagcagaacaagcaggtggtcccagtgtccagccaccgcaaccccctgctggacctggctgcttacgaccaggagggccgccggttcgacaacttcagctctctgagcatccagtgggagtccaccaggccagtgttggccagcatcgagcctgagctgcccatgcagctggtgtcccaggacgatgagagtggccaaaagaagctgcacggtttgcaggccattttggttcacgaggcatcaggaaccacagcatcactgccactgccactggctaccaggagtcccacctcagctctgncagaacaaagcagccgcatgaccctctggtgcctctgtcggcctccatagagctcatcctggtggaggacgtgagggtgagcccagaagaggtgaccatctacaaccaccctggcatccaggcagagctccgcatcagggaaggctcaggttacttcttcctcaacaccagcaccgcagatgttgtcaaggtggcctaccaggaggccaggggtgtcgccatggtgcaccctttgctcccgggctcatccaccatcatgatccatgacttgtgcctcgtcttcccggccccagccaaggctgtcgtttacgtgtcggacattcaggagctgtacatccgtgtggttgacaaggtggagattgggaagacagtgaaggcatacgtccgcgtgctggacttgcacaagaagcccttccttgccaaatacttccccttcatggacctgaagctccgagcagcctccccgatcattacattggtggcccttgatgaagcccttgacaactacaccatcacattcctcatccgcggtgtggccatcggccagaccagtctaactgcaagtgtgaccaataaagctggacagagaatcaactcarccccacaacagattgaagtctttcccccgttcaggctgatgcccaggaaggtgacactgcttatcggggccacgatgcaggtcacctccgagggcggcccccagcctcagtccaacatccttttctccatcagcaatgagagcgttgcgctggtgagcgctgctgggctggtacagggcctcgccatcgggaacggcactgtgtctgggctcgtgcaggcagtggatgcagagaccggcaaggtggtcatcatctctcaggacctcgtgcaggtggaagtgctgctgctaagggcctgtctcttatacacatctcaacctgcagg

SEQ ID NO: 397 - DNA, 2924 bp, Homo sapiens
  misc_feature (33)..(33): n equals a,t,g, or c
gaggcccttggtggccggtgcctttgggaatgnccggtgaccttcactgtccacttccrcgacaactctggagatgtcttccatgctcacagttcggtcctcaactttgccactaacagagacgactttgtgcagatcgggaagggccccaccaacaacacctgtgttgtccgcacagtcagcgtgggcctgacactgctccgtgtgtgggacgcagagcacccgggcctctcggacttcatgcccctgcctgtcctacaggccatctccccagagctgtctggggccatggtggtgggggacgtgctctgtctggccactgttctgaccagcctggaaggcctctcaggaacctggagctcctcggccaacagcatcctccacatcgaccccaagacgggtgtggctgtggcccgggccgtgggatccgtgacggtttactatgaggtcgctgggcacctgaggacctacaaggaggtggtggtcagcgtccctcagaggatcatggcccgtcacctccaccccatccagaccagcttccaggaggctacagcctccaaagtgattgttgccgtgggagacagaagctctaacctgagaggcgagtgcacccccacccagagggaagtcatccaggccttgcacccagagaccctcatcagctgccagtcccagttcaagccggccgtctttgatttcccatctcaagatgtgttcaccgtggagccacagtttgacactgctctcggccagtacttctgctcaatcacaatgcacaggctgacggacaagcagcggaagcacctgagcatgaagaagacagctctggtggtcagtgcctccctctccagcagccacttctccacagagcaggtgggggccgaggtgcccttcagcccaggtctcttcgccgaccaggctgaaatccttttgagcaaccactacaccagttccgagatcagggtctttggtgccccggaggttctggagaacttggaggtgaaatccgggtccccggccgtgctggcattcgcaaaggagaagtcttttgggtggcccagcttcatcacatacacggtcggcgtcttggaccccgcggctggcagccaagggcctctgtccactaccctgaccttctccagccccgtgaccaaccaagccattgccatcccagtgacagtggcttttgtgrtggatcgccgtgggcccggtccttatggagccagcctcttccagcacttcctggattcctaccaggtcatgttcttcacgctcttcgccctgttggctgggacagcggtcatgatcatagcctaccacactgtctgcacgccccgggatcttgctgtgcctgcagccctcacgcctcgagccagccctggacacagcccccactatttcgctgcctcatcacccacatctcccaatgcattgcctcctgctcgcaaagccagccctccctcagggctgtggagcccagcctatgcctcccactaggccgcgtgaaggttcccggaggatgggtctcagccgagcctcgtgcacccccaagatggaacatccctgctgcattcacactggaacaagcccctccagatgagtgccccggccccaggccagcttcactgccgtctcttcacacagagctgtagtttcggctctgcccattagctcattttatgtaggagttttaaatgtgtgtttttttcctttcaagtcttacaaagctaagactttttggctcattcctttttgcatggttgtctagggtttctggacaatgtgctgttgcatttttattttcctagccttgctaaaatctttcccttctcaagactttgagcagttagaagtgctctttagaagttgtctgtgggtgatgttactgtagtggtctcagggaaaggattgtccagttactttagggggtttttggtggggtttttccccctgtgaaaacttactttgcccctagtctggctgctgctaggacttctgaggagcaatgggacatgagtgtccctgtatctgcgccactgccgcaagggaagcctcaggaaccagcacctggaggccagggctgctgcccaaccatgggccactgtgaacagacttcagtcctctgtttttgtttcataagccgttgagacatctgatggacttggcttaggccctgctgggacatcccacgtgtgatccctttcactccatcaggacaccaggactgtccttaggaaaatgtccttgagatggcagcaggagtcatattttctgtgtgtgtgtttcggaaagccgctgtgtcctgcctcagcacaaagacccagtgtcatttgctcctcctgttcctgtgccactccagaacctcagcagatctgagccaccgcctgccagtgtgagaggcggccactttcatggcagctcatcaggcgcagggccccagacagcttcccagcmggccctagagcccggcctgggccaatgatggagggcggccrccagcccagggcctgcccatccagaagggactccccagggcctgggggaggagacccttggaaaagtcctctcttcccagctcctgattctggatctgagattctcagatcacaggcccctgtgctccaggccgaggctgggctaccctcagggagatccagagactcatgcccatggccatccatgcgtggacgctgtgtggagagtccaggatgacgggatcccgcacaagctcccttcagtccttcagggctgggccatgtggttgatttttctaaagctggagaaaggaagaattgtgccttgcatattacttgagcttaaactgacaacctggatgtaaataggagcctttctactggtttatttaataaagttctatgtgattttttaaaaaaaaaaaaaaaactcgtgcgaatcttggcctc

SEQ ID NO: 398 - DNA, 518 bp, Homo sapiens
  misc_feature (388)..(388): n equals a,t,g, or c
  misc_feature (414)..(414): n equals a,t,g, or c
  misc_feature (458)..(458): n equals a,t,g, or c
  misc_feature (501)..(501): n equals a,t,g, or c
tcgacccacgcgtccggcacgktcgccaggcaccgctgaccgaggcctgctgggattccagaattggagagggaggcaccatgaagactctcctgctgctggtggggctgctgctgacctgggagaatggacgggttctgggagaccagatggtctcagacactgagctccaggaaatgtccaccgaggggagtaagtacattaatcgggaaattaaaaatgctctcaagggggtgaagcagataaagacactaatagaacaaacaaacgaggagcgcaaatccctgctcaccaacttggaagaagccaagaagaagaaagaggatgccctgaatgacaccaaggattcagaaatgaagctgaaggcgtccccaggggttttcaatgncacccttgatggccctctgggaggantttaagcccttccttgaaaacagacctgtattgaagttctaagncccgagtcttccagaagccagccacaaggcttggtttggccanccaggtttgaaggagtt

SEQ ID NO: 399 - DNA, 518 bp, Homo sapiens
  misc_feature (388)..(388): n equals a,t,g, or c
  misc_feature (414)..(414): n equals a,t,g, or c
  misc_feature (458)..(458): n equals a,t,g, or c
  misc_feature (501)..(501): n equals a,t,g, or c
tcgacccacgcgtccggcacgktcgccaggcaccgctgaccgaggcctgctgggattccagaattggagagggaggcaccatgaagactctcctgctgctggtggggctgctgctgacctgggagaatggacgggttctgggagaccagatggtctcagacactgagctccaggaaatgtccaccgaggggagtaagtacattaatcgggaaattaaaaatgctctcaagggggtgaagcagataaagacactaatagaacaaacaaacgaggagcgcaaatccctgctcascaacytggaagaagccaagaagaagaaagaggatgccctgaatgacaccaaggattcagaaatgaagctgaaggcgtccccaggggttttcaatgncacccttgatggccctctgggaggantttaagcccttccttgaaaacagacctgtattgaagttctaagncccgagtcttccagaagccagccacaaggcttggtttggccanccaggtttgaaggagtt

SEQ ID NO: 400 - DNA, 1670 bp, Homo sapiens
ccacgcgtccggcacggtcgccaggcaccgctgaccgaggcctgctgggattccagaattggagagggaggcaccatgaagactctcctgctgctggtggggctgctgctgacctgggagaatggacgggttctgggagaccagatggtctcagacactgagctccaggaaatgtccaccgaggggagtaagtacattaatcgggaaattaaaaatgctctcaagggggtgaagcagataaagacactaatagaacaaacaaacgaggagcgcaaatccctgctcaccaacttggaagaagccaagaagaagaaagaggatgccctgaatgacaccaaggattcagaaatgaagctgaaggcgtcgcagggggtgtgcaatgacaccatgatggccctctgggaggagtgtaagccctgcctgaaacagacctgggggaagggtctacgcccgagtctgcagaagcagcacagggctggttggccaccaggttgaggagttcctgaaccagagttctcccttctacttctggattaatggcgaccgcatcgactccctgctggagaacgaccggcagcagacccacgccctggatgtcatgcaggacagtttcgaccgggcatccagcatcatggatgagctgttccaggacagattcttcacccgtgaggcccaggaccctttccacttctcacccttcagctcattccagcggaggccttttttcttcaatatcaagcaccgctttgcccggaacataatgcctttccctggctaccagcccttgaatttccacgacatgtttcagcccttcttcgacatgatacaccaggctcagcaggccatggatgttaacctgcacagactcccccactttccaatggaattcacagaagaagacaaccaggacggcgccgtgtgcaaggagatccgtcacaactccacagggtgcctgaagatgaaggaccagtgtgaaaagtgccgggagatcttgtctgtggactgttcgtccaacaaccccgctcaggtccagctgcgacaggaacttaataattccctccagattgcagagaagttcaccaagcttgtacgacgagctgctgcagtcctaccaggagaagatgttcaacacgtcctccctgctgaagcagctggacgagcagtttagctgggtgtcccagctggcgaatctcactcagactgaggacccgttctatctccaggtcacgacggtgagttcccagacttctgactccagtgctccctctggcgtcactaaggtggttgtgaagctctttgattccgaccccatcaccgtgatcctcccagaagacctctccaggaacaatcctaaatttatggagaccgtggcagagaaagcccttcaggaataccgccagaagagccgggaggagtgagatgggaacactgcctctccacatggcaggtgtctgagttctgtcgcccccgcgatgagcgataggcccctagagagagctctgcatgtcaccgagtgaccgggccttccttgaggccctcctgtcccctcaccccgcctgtcctccctctggactctgcattgtaacaccgtgttcactgatcatgggaagaactcctgtgtgccactaactcaataaaaccaccagtaatctgaaaaaaaaaaaaaaaaa

SEQ ID NO: 401 - DNA, 606 bp, Homo sapiens
  misc_feature (591)..(591): n equals a,t,g, or c
  misc_feature (593)..(593): n equals a,t,g, or c
  misc_feature (600)..(601): n equals a,t,g, or c
  misc_feature (605)..(605): n equals a,t,g, or c
ctttttttttttttttttcagattactggtggttttattgagttagtggcacacaggagttcttcccatgatcagtgaacacggtgttacaatgcagagtccagagggaggacaggcggggtgaggggacaggagggcctcaaggaaggcccggtcactcggtgacatgcagagctctctctaggggcctatcgctcatcgcgggggcgacagaactcagacacctgccatgtggagaggcagtgttcccatctcactcctcccggctcttctggcggtattcctgaagggctttctctgccacggtctccataaatttaggattgttcctggagaggtcttctgggaggatcacggtgatggggtcggaatcaaagagcttcacaaccaccttagtgacgccagagggagcactggagtcagaagtctgggaactcaccgtcgtgacctggagatagaacgggtcctcagtctgagtgagattcgccagctgggacacccagctaaactgctcgtccagctgcttcarcaggragracgwgttgaacatcttctcctggtaggactgcagcagctcgksgtgggtgcctnanacaacannctana

SEQ ID NO: 402 - DNA, 841 bp, Homo sapiens
  misc_feature (20)..(20): n equals a,t,g, or c
  misc_feature (29)..(29): n equals a,t,g, or c
  misc_feature (34)..(34): n equals a,t,g, or c
  misc_feature (57)..(57): n equals a,t,g, or c
  misc_feature (101)..(101): n equals a,t,g, or c
  misc_feature (703)..(703): n equals a,t,g, or c
  misc_feature (779)..(779): n equals a,t,g, or c
cttagtacgccaaaggaacnctgaatcanaagcntggacctcaccgtcgtgacctgnagatagaccgggtcctcagtctgagtgagattcgccagctgggnccacccagctaaactgcttcgtccagcttgcttcagcaggaagacgtgttgaacatcttctcctggtaggactgcagcagctcgtcgtacaagcttggtgaacttctctgcaatctggagggaattattaagttcctgtcgcagctggacctgagcggggttgttggacgaacagtccacagacaagatctcccggcacttttcacactggtccttcatcttcaggcaccctgtggagttgtgacggatctccttgcacacggcgccgtcctggttgtcttcttctgtgaattccattggaaagtgggggagtctgtgcaggttaacatccatggcctgctgagcctggtgtatcatgtcgaagaagggctgaaacatgtcgtggaaattcaagggctggtagccagggaaaggcattatgttccgggcaaagcggtgcttgatattgaagaaaaaaggcctccgctggaatgagctgaagggtgagaagtgsaaagggtcctgggcctcacgggtgaagaatctgtcctggaacagctcatccatgatgctggatgcccggtcgaaactgtcctgcatgacatccagggcgtgggtctgcnaccggtcgttctccagcagggagtcgatgcggtcgccattaatccagaagtagaagggagaactctggttcagganctcctcaacctggtggccaaccagccctgtgctgcttctgcagactcgggcgtagacccttc

SEQ ID NO: 403 - DNA, 868 bp, Homo sapiens
  misc_feature (1)..(1): n equals a,t,g, or c
  misc_feature (23)..(23): n equals a,t,g, or c
  misc_feature (31)..(31): n equals a,t,g, or c
  misc_feature (45)..(45): n equals a,t,g, or c
  misc_feature (829)..(829): n equals a,t,g, or c
  misc_feature (860)..(860): n equals a,t,g, or c
ntttcagcagttccgcatgcccntccgtggnaagcctgttcgtgntattgggcaagaacccccatgatgcccaaggccatccaagggcatctgaagaccaacccagctctggaaaacctgttacttcatatccgggggaatgtggctttgtgttcaccaaggaggcctcacttgagatcagggacatgctgctggccaataaggtgccagctgccgcccgtgctggtgccatagccccatgtgaggtcactgtgccagcccagaacactggtctggggcccgagaagacctccttcttccaggctttaggcatcaccactaaaatctccagaggaaccattgaaatcctgagtgatgtgcagctgattaagaccggagacaaagtgggagccagtgaagccacactgctgaacatgctgaacatctcccccttctcctttgggctgatcatccagcaggtgtttgacaatggcagcatctacaaccctgaagtgcttgacatcacagaggaaactctgcattctcgcttcctggagggtgtccgcaatgttgccagcgtatgtctgcagataggttacccaactgtggcatcagtgccccattctatcatcaatggatacaagcgggtcctggctttgtctgtggagactgattacacctttccacttgctgaaaaggtcaaggccttcttggctgatccatctgcatttgtggctgctgcccctgtggccgctgccaccactgctgcacctgctgctgctgcagccccagccaaagttgaagcaaaggaagagtcggaggaawcggatgagagkattktcamttcganaatcagcaaaagcaacaattccagccagttnattgtgaa

SEQ ID NO: 404 - DNA, 1540 bp, Homo sapiens
ggcacgagggaactagtatattcaccgtctatgaggccgcctcacaggaaggctgggtgttcctcatgtacagagcaattgacagctttccccgttggcgttcctacttctatttcatcactctcattttcttcctcgcctggcttgtgaagaacgtgtttattgctgttatcattgaaacatttgcagaaatcagagtacagtttcaacaaatgtggggatcgagaagcagcactacctcaacagccaccacccagatgtttcatgaagatgctgctggaggttggcagctggtagctgtgggatgtcaacaagccccagggacgcgccccagcctgcctccaggtgcagtacaatgacatttttaaaaatcgcccagcaaaggtctttgaattttatttcatccaagaaaatccacagctctttaagctctagatttgtccaaatttaaaatcctgaagttagagatggtatttcactccttcctctattcccaggacctagctttttttttttaacatacacaatagggatttgataagtttctgatggctgcaggcatgtaagagcatttcagtggtattgaatcaatgaagaattttgttgacatgtgaaatcttataaaaatattctttaccgaaggactgagttatgtggcagtgggcaaattcattgtttcatacctcccctagtaactgggaaaaatatgttaatacatagtctctctgtttttctgcatttggaagctttcagaggaacataatgtagaggtgtttctttagcaaagtgcactgatagcaaacataaggattgcaggtggggcctgagagtcctcatgagatagattctcacagtgattagaagatggagtctcacgtccctgcctgtgaactttctggaaaaaccatcttctccaagctgccattgacaacaatatggataacaataataacaataaggcccaataaactcctttatctcttcttcagggggccatactgacatcttctcttccttggtttcccctccttgccccctaaatatccagtaactcattcaaaataatgtcaccttaccaagagcagcacccctaactttccataatattttcactttcattttccctccaagcagcccactcgtaggaccgtagaattgattcttccacctggagaattttattttctttagcctttttggttttcagtgacaaatcctcttctcgcaaggggtggtttccatagttgtttatatcctgccctcataatttggagaagtgttcacatctgccgtgggatgagactgtatctcttttctttcttttgggtctttctccagatagggacttcttatgcaactcaaggatgggtacatgaaaaataaaattgtactctgagccattactggtgggctatgtttatatggccattttaccatagagttatttacttctttttgtttctatttgtattgaggtgtgattaacaaataaaattgtaaatacttaaggtaaaaaaaaaaaaaaaaaaaaaaaaaaaaa

SEQ ID NO: 405 - protein, 207 aa, Homo sapiens
MIKHVAWLIFTNCIFFCPVAFFSFAPLITAISISPEIMKSVTLIFFPLPACLNPVLYVFFNPKFKEDWKLLKRRVTKKSGSVSVSISSQGGCLEQDFYYDCGMYSHLQGNLTVCDCCESFLLTKPVSCKHLIKSHSCPALAVASCQRPEGYWSDCGTQSAHSDYADEEDSFVSDSSDQVQACGRACFYQSRGFPLVRYAYNLPRVKD

SEQ ID NO: 406 - protein, 114 aa, Homo sapiens
  SITE (13): Xaa equals any of the naturally occurring L-amino acids
MAGPRASTGPRPXCLVLFLFNFIFCFMSVCPPTPTPFSVKWGALGESLLPPSLSQDLPPRHQPSLWTRQRADRVGRGLRVARASPPANGPLLRPPVSPCPFLKQNALVCKPLDA

SEQ ID NO: 407 - protein, 49 aa, Homo sapiens
MRLCSFTKVPMNLFLNVILLKFYNFLFSLILGKSCLASLGLCKNNKCLS

SEQ ID NO: 408 - protein, 218 aa, Homo sapiens
MGSAALEILGLVLCLVGWGGLILACGLPMWQVTAFLDHNIVTAQTTWKGLWMSCVVQSTGHMQCKVYDSVLALSTEVQAARALTVSAVLLAFVALFVTLAGAQCTTCVAPGPAKARVALTGGVLYLFCGLLALVPLCWFANIVVREFYDPSVPVSQKYELGAALYIGWAATALLMVGGCLLCCGAWVCTGRPDLSFPVKYSAPRRPTATGDYDKKNYV

SEQ ID NO: 409 - protein, 62 aa, Homo sapiens
  SITE (16): Xaa equals any of the naturally occurring L-amino acids
  SITE (54): Xaa equals any of the naturally occurring L-amino acids
MVTGFFFILMTVLWFXREPGFVPGWDSFFEKKGYRTDATVSVFLGFLLFLIPAXEALLWEKE

SEQ ID NO: 410 - protein, 122 aa, Homo sapiens
MCYLLLLLIQTAELLIHPQGLQAVSNGESALKGTRPTFSSPFILVTEGRKEWEGVFLSSGWKGNTLSNYYISLVFYYSRILQPYFYCLWGKLEMVTLIRSVWRGINGGDKIQLVLENVKVLK

SEQ ID NO: 411 - protein, 91 aa, Homo sapiens
MRLCVTGPPVFFFFLNFFFFLCVGACLGDLKISRLVYLCKACLRLEYLGKESDSMLSEFLKGQKKNWRLLKCRFEVIFLKYYFGFCDIVKN

SEQ ID NO: 412 - protein, 50 aa, Homo sapiens
MLTYLPRWCFLSLPPPCCGAASCTMMHIQIILNTHILIERFLGFLLNQVY

SEQ ID NO: 413 - protein, 446 aa, Homo sapiens [sequence omitted]

SEQ ID NO: 414 - protein, 140 aa, Homo sapiens
  SITE (129): Xaa equals any of the naturally occurring L-amino acids
  SITE (132): Xaa equals any of the naturally occurring L-amino acids
  SITE (134): Xaa equals any of the naturally occurring L-amino acids
MFFSLPGLWQIASFTHNLIFHLWVWGSESGEHLQSHNDPDTRQGGHIPIRLLGESSASVPGSSEGHTGGPAPPRVGGSAGIIRTHVVFLVSWPLLQREQHRLSWKLPSVMWGDSREPHLARLDQSKWPXATXAXQYLGRG

SEQ ID NO: 415 - protein, 563 aa, Homo sapiens
MWAVLRLALRPCARASPAGPRAYHGDSVASLGTQPDLGSALYQENYKQMKALVNQLHERVEHIKLGGGEKARALHISRGKLLPRERIDNLIDPGSPFLELSQFAGYQLYDNEEVPGGGIITGIGRVSGVECMIIANDATVKGGAYYPVTVKKQLRAQEIAMQNRLPCIYLVDSGGAYLPRQADVFPDRDHFGRTFYNQAIMSSKNIAQIAVVMGSCTAGGAYVPAMADENIIVRKQGTIFLAGPPLVKAATGEEVSAEDLGGADLHCRKSGVSDHWALDDHHALHLTRKVVRNLNYQKKLDVTIEPSEEPLFPADELYGIVGANLKRSFDVREVIARIVDGSRFTEFKAFYGDTLVTGFARIFGYPVGIVGNNGVLFSESAKKGTHFVQLCCQRNIPLLFLQNITGFMVGREYEAEGIAKDGAKMVAAVACAQVPKITLIIGGSYGAGNYGMCGRAYSPRFLYIWPNARISVMGGEQAANVLATITKDQRAREGKQFSSADEAALKEPIIKKFEEEGNPYYSSARVWDDGIIDPADTRLVLGLSFSAALNAPIEKTDFGIFRM

SEQ ID NO: 416 - protein, 53 aa, Homo sapiens
MVQFEVIFLLFGLCFSSSSSRLVGSQVENFSPTPCIFQAFRCSSLAIISMSLS

SEQ ID NO: 417 - protein, 421 aa, Homo sapiens
MTVFFKTLRNHWKKTTAGLCLLTWGGHWLYGKHCDNLLRRAACQEAQVFGNQLIPPNAQVKKATVFSILQLAKEKPGLYLKKMLPDFTFIWHGCDYCKTDYEGQAKKLLELMENTDVIIVAGGDGTLQEVVTGVLRRTDEATFSKIPIGFIPLGETSSLSHTLFAESGNKVQHITDATLAIVKGETVPLDVLQIKGEKEQPVFAMTGLRWGSFRDAGVKVSKYWYLGPLKIKAAHFFSTLKEWPQTHQASISYTGPTERPPNEPEETPVQRPSLYRRILRRLASYWAQPQDALSQEVSPEVWKDVQLSTIELSITTRNNQLDPTSKEDFLNICIEPDTISKGDFITIGSRKVRNPKLHVEGTECLQASQCTLLIPEGAGGSFSIDSEEYEAMPVEVKLLPRKLQFFCDPRKREQMLTSPTQ

SEQ ID NO: 418 - protein, 242 aa, Homo sapiens [sequence omitted]

SEQ ID NO: 419 - protein, 41 aa, Homo sapiens
MATLQITTAMKITMMITMVMIITTIVEAMKIPTTAMMMAMQ

SEQ ID NO: 420 - protein, 50 aa, Homo sapiens
MYIFELSLYLEGTSFVVVLLFLLISVSLDSPPTTKGWDSVLHIWVPLIVQ

SEQ ID NO: 421 - protein, 189 aa, Homo sapiens
  SITE (94): Xaa equals any of the naturally occurring L-amino acids
MALLSRPALTLLLLLMAAVVRCQEQAQTTDWRATLKTIRNGVHKIDTYLNAALDLLGGEDGLCQYKCSDGSKPFPRYGYKPSPPNGCGSPLFGXHLNIGIPSLTKCCNQHDRCYETCGKSKNDCDEEFQYCLSKICRDVQKTLGLTQHVQACETTVELLFDSVIHLGCKPYLDSQRAACRCHYEEKTDL

SEQ ID NO: 422 - protein, 140 aa, Homo sapiens [sequence omitted]

SEQ ID NO: 423 - protein, 64 aa, Homo sapiens
MPLFLFVAHLISLLLAFRRPPASQITPRAWTTEIASCESVEMVKALSSLRSRAQVNADFPGHLC

SEQ ID NO: 424 - protein, 49 aa, Homo sapiens
MNLLGMIFSMCGLMLKLKWCAWVAVYCSFISFANSRSSEDTKQMMSSFM

SEQ ID NO: 425 - protein, 59 aa, Homo sapiens
MNSTLCVVLSLMCMNSTLCVVLSLTHSCPSPQVPKVHYMIFMPLHLHSLALTQLIIIYK

SEQ ID NO: 426 - protein, 240 aa, Homo sapiens
MGNCQAGHNLHLCLAHHPPLVCATLILLLLGLSGLGLGSFLLTHRTGLRSPDIPQDWVSFLRSFGQLTLCPRNGTVTGKWRGSHVVGLLTTLNFGDGPDRNKTRTFQATVLGSQMGLKGSSAGQLVLITARVTTERTAGTCLYFSAVPGILPSSQPPISCSEEGAGNATLSPRMGEECVSVWSHEGLVLTKLLTSEELALCGSRLLVLGSFLLLFCGLLCCVTAMCFHPRRESHWSRTRL

SEQ ID NO: 427 - protein, 185 aa, Homo sapiens
MSPSGRLCLLTIVGLILPTRGQTLKDTTSSSSADSTIMDIQVPTRAPDAVYTELQPTSPTPTWPADETPQPQTQTQQLEGTDGPLVTDPETHKSTKAAHPTDDTTTLSERPSPSTDVQTDPQTLKPSGFHEDDPFFYDEHTLRKRGLLVAAVLFITGIIILTSGKCRQLSRYAGIIGGESIRNRS

SEQ ID NO: 428 - protein, 39 aa, Homo sapiens
MLLLLKTLFVTFWSTNLSITFSNYNVKLYQWQSYIVNGS

SEQ ID NO: 429 - protein, 174 aa, Homo sapiens [sequence omitted]

SEQ ID NO: 430 - protein, 40 aa, Homo sapiens
MPFSSSVKCLFGVLLRFCFVVFSVVVFTFFLSIPKRTLGY

SEQ ID NO: 431 - protein, 46 aa, Homo sapiens
MEMLSSKWSKRVAASLAHLISLFIGLLFLLLGSSVYPGTETLFPKS

SEQ ID NO: 432 - protein, 61 aa, Homo sapiens
MYLFLKTLLSFSTLMMTTALSFMVITVLWVLLLHLLANICIPRKCSFACFYINGILLHAVF

SEQ ID NO: 433 - protein, 319 aa, Homo sapiens
MSWCCLWLCLSSVGRTGSAGPSLPFSELCSLGLLRLRPVFSPLHSGPGKPAQFLAGEAEEVNAFALGFLSTSSGVSGEDEVEPLHDGVEEAEKKMEEEGVSVSEMEATGAQGPSRVEEAEGHTEVTEAEGSQGTAEADGPGASSGDEDASGRAASPESASSTPESLQARRHHQFLEPAPAPGAAVLSSEPAEPLLVRHPPRPRTTGPRPRQDPHKAGLSHYVKLFSFYAKMPMERKALEMVEKCLDKYFQHLCDDLEVFAAHAGRKTVKPEDLELLMRRQGLVTDQVSLHVLVERHLPLEYRQLLIPCAYSGNSVFPAQ

SEQ ID NO: 434 - protein, 336 aa, Homo sapiens [sequence omitted]

SEQ ID NO: 435 - protein, 272 aa, Homo sapiens
MWGNKFGVLLFLYSVLLTKGIENIKNEIEDASEPLIDPVYGHGSQSLINLLLTGHAVSNVWDGDRECSGMKLLGIHEQAAVGFLTLMEALRYCKVGSYLKSPKFPIWIVGSETHLTVFFAKDMALVAPEAPSEQARRVFQTYDPEDNGFIPDSLLEDVMKALDLVSDPEYINLMKNKLDPEGLGIILLGPFLQEFFPDQGSSGPESFTVYHYNGLKQSNYNEKVMYVEGTAVVMGFEDPMLQTDDTPIKRCLQTKWPYIELLWTTDRSPSLN

SEQ ID NO: 436 - protein, 89 aa, Homo sapiens
MFKDYPPAIKPSYDVLLLLLLLVLLLQAGLNTGTAIQCVRFKVSARLQGASWDTQNGPQERLAGEVARSPLKEFDKEKAWRAVVVQMAQ

SEQ ID NO: 437 - protein, 52 aa, Homo sapiens
MYLMSFSIHFVKIICMCTILVLSPPVLLKYQDSTPRPLWSQCKIPINYLKGK

SEQ ID NO: 438 - protein, 51 aa, Homo sapiens
  SITE (23): Xaa equals any of the naturally occurring L-amino acids
MAQHHLLSILLAILSCSSQPRQXRGSGALPCEVCSAVLLTCLRKISGSLCV

SEQ ID NO: 439 - protein, 63 aa, Homo sapiens
MLRGWALSTFLVCILQWVRSLTIRLASALSVRGPSSIPASLAIIYTLFIFSFKFLKIVKSIYI

SEQ ID NO: 440 - protein, 74 aa, Homo sapiens
MLHLAAMWWACVTTLVFTLVSKLFIPLKSSMDGEMSLDPHSCVLVCICFPLRFVFVSCFELYLVQSIVKLSQQL

SEQ ID NO: 441 - protein, 127 aa, Homo sapiens [sequence omitted]

SEQ ID NO: 442 - protein, 43 aa, Homo sapiens
MSALSFTSYFLLLLRVKPVEVSGSIPHPEQPNVLCLVLPTFGY

SEQ ID NO: 443 - protein, 2 aa, Homo sapiens
LQ

SEQ ID NO: 444 - protein, 44 aa, Homo sapiens
MMPLKLHAKCLYLLKCVFFVGVGGMTFYQILTGFKIQKSLDLVG

SEQ ID NO: 445 - protein, 47 aa, Homo sapiens
MFYPPCPFFPQLCFCIFFLGKCKLSLSFMTCEISVSLEFVRRRGNHA

SEQ ID NO: 446 - protein, 100 aa, Homo sapiens
  SITE (36): Xaa equals any of the naturally occurring L-amino acids
  SITE (47): Xaa equals any of the naturally occurring L-amino acids
  SITE (51): Xaa equals any of the naturally occurring L-amino acids
  SITE (83): Xaa equals any of the naturally occurring L-amino acids
MGMILVLASFLAHPVEALAQAVALGQQQLALLGVQXHAVEGFLQLQXCFAXLFVFEGALLAHLGHFFVEPGAAQGQLLDLGLXRRELGFQFALLARFVLQ

SEQ ID NO: 447 - protein, 40 aa, Homo sapiens
MIILHIVVCLFTISIIEEQKEEILCSTKSQAEKTVTHIEQ

SEQ ID NO: 448 - protein, 45 aa, Homo sapiens
MQKKKLVCYLMLRQYFFLVVVSLPWPCVLFQMHYPRTVTPTLTEY

SEQ ID NO: 449 - protein, 146 aa, Homo sapiens
MWKLWRAEEGAAALGGALFLLLFALGVRQLLKQRRPMGFPPGPPGLPFIGNIYSLAASSELPHVYMRKQSQVYGEVQPRRAPGREGRQAGPGWPGPSWLDLWPPLGRLVGTSPCAGCPLRDTRFPGLEGRSPRRRAPLQGEPRPCR

SEQ ID NO: 450 - protein, 941 aa, Homo sapiens [sequence omitted]

SEQ ID NO: 451 - protein, 316 aa, Homo sapiens
MTQGKLSVANKAPGTEGQQQVHGEKKEAPAVPSAPPSYEEATSGEGMKAGAFPPAPTAVPLHPSWAYVDPSSSSSYDNGFPTGDHELFTTFSWDDQKVRRVFVRKVYTILLIQLLVTLAVVALFTFCDPVKDYVQANPGWYWASYAVFFATYLTLACCSGPRRHFPWNLILLTVFTLSMAYLTGMLSSYYNTTSVLLCLGITALVCLSVTVFSFQTKFDFTSCQGVLFVLLMTLFFSGLILAILLPFQYVPWLHAVYAALGAGVFTLFLALDTQLLMGNRRHSLSPEEYIFGALNIYLDIIYIFTFFLQLFGTNRE

SEQ ID NO: 452 - protein, 51 aa, Homo sapiens
MSHSVFAHYIFNILLLLLLLLLIGFLYSMPFIYKDTKKTHVCNFNNIFPIL

SEQ ID NO: 453 - protein, 267 aa, Homo sapiens
  SITE (172): Xaa equals any of the naturally occurring L-amino acids
  SITE (175): Xaa equals any of the naturally occurring L-amino acids
MSEIRGKPIESSCMYGTCCLWGKTYSIGFLRFCKQATLQFCVVKPLMAVSTVVLQAFGKYRDGDFDVTSGYLYVTIIYNISVSLALYALFLFYFATRELLSPYSPVLKFFMVKSVIFLSFWQGMLLAILEKCGAIPKIHSARVSVGEGTVAAGYQDFIICVEMFFAALALRXAFXYKVYADKRLDAQGRCAPMKSISSSLKETMNPHDIVQDAIHNFSPAYQQYTQQSTLEPGPTWRGGAHGLSRSHSLSGARDNEKTLLLSSDDEF

SEQ ID NO: 454 - protein, 53 aa, Homo sapiens
MLVLMTTCILAAVCVHTAQCAPDSRMDNDCPSHQAQIHFRASEVRRGWTFNHD

SEQ ID NO: 455 - protein, 87 aa, Homo sapiens
MGLHLRPYRVGLLPDGLLFLLLLLMLLADPALPAGRHPPVVLVPGDLGNQLEAKLDKPTVVHYLCSKKTESYFTIWLNLELLLPVHH

SEQ ID NO: 456 - protein, 40 aa, Homo sapiens
MGPSQREVTVQWHRALFLLPLLLLSTRTETKNFGFKWLKD

SEQ ID NO: 457 - protein, 525 aa, Homo sapiens
  SITE (210): Xaa equals any of the naturally occurring L-amino acids
MLAFPLLLTGLISFREKRLQDVGTPAARARAFFTAPVVVFHLNILSYFAFLCLFAYVLMVDFQPVPSWCECAIYLWLFSLVCEEMRQLFYDPDECGLMKKAALYFSDFWNKLDVGAILLFVAGLTCRLIPATLYPGRVILSLDFILFCLRLMHIFTISKTLGPKIIIVKRMMKDVFFFLFLLAVWVVSFGVAKQAILIHNERRVDWLFRXAVYHSYLTIFGQIPGYIDGVNFNPEHCSPNGTDPYKPKCPESDATQQRPAFPEWLTVLLLCLYLLFTNILLLNLLIAMFNYTFQQVQEHTDQIWKFQRHDLIEEYHGRPAAPPPFILLSHLQLFIKRVVLKTPAKRHKQLKNKLEKNEEAALLSWEIYLKENYLQNRQFQQKQRPEQKIEDISNKVDAMVDLLDLDPLKRSGSMEQRLASLEEQVAQTARALHWIVRTLRASGFSSEADVPTLASQKAAEEPDAEPGGRKKTEEPGDSYHVNARHLLYPNCPVTRFPVPNEKVPWETEFLIYDPPFYTAERKDAA

SEQ ID NO: 458 - protein, 484 aa, Homo sapiens
  SITE (322): Xaa equals any of the naturally occurring L-amino acids
  SITE (345): Xaa equals any of the naturally occurring L-amino acids
  SITE (374): Xaa equals any of the naturally occurring L-amino acids
MVATVCGLLVFLSLGLVPPVRCLFALSVPTLGMEQGRRLLLSYSTATLAIAVVPNVLANVGAAGQVLRCVTEGSLESLLNTTHQLHAASRALGPTGQAGSRGLTFEAQDNGSAFYLHMLTVTQQVLEDFSGLESLARAAALGTQRVVTGLFMLGLLVESAWYLHCYLTDLRFDNIYATQQLTQRLAQAQATHLLAPPPTWLLQAAQLRLSQEELLSCLLRLGLLALLLVATAVAVATDHVAFLLAQATVDWAQKLPTVPITLTVKYDVAYTVLGFIPFLFNQLAPESPFLSVHSSYQWELRLTSARCPLLPARRPRAAAPLXAGGLQLLAGSTVLLEGYARRLRXAIAASFFTAQEARRIRHLHARLQRRHDRXQGQQLPLGDPSCVPTPRPACKPPAWIAYRLDALRTESSEGEGKELWSCRDLSCHLGPVPPPCVTLGKSLHLSEPRFLHLHNDSIFTIDVTYFPRRDVVRMEGNTGHDRPG

SEQ ID NO: 459 - protein, 122 aa, Homo sapiens
MIGGITCILSLICALALAYLDQRAERILHKEQGKTGEVIKLTDVKDFSLPLWLIFIICVCYYVAVFPFIGLGKVFFTEKFGFSSQAASAINSVVYVISAPMSPVFGLLVDKTGKNIIWVLCA

SEQ ID NO: 460 - protein, 46 aa, Homo sapiens
MPWLKSLLHFSLFLVVFSTLAVKSLGVPVAAGSPFCIVDVLHFILL

SEQ ID NO: 461 - protein, 66 aa, Homo sapiens
MSWVIVVIIWGYLLEGHGVPFCKSYGPSPWKLHTHHAAYNSGSSQVYRILETLMSGSTHCSFSGTF

SEQ ID NO: 462 - protein, 90 aa, Homo sapiens
MPRAPWRIPLCALPTLCLGSPLPSQPTHPIFYDHRAPTWKMAHPGGPRSSHSPRTWRTPSSQTKAALPAGGARNSPLQLCTRSRFCGTPM

SEQ ID NO: 463 - protein, 710 aa, Homo sapiens
MPVPWFLLSLALGRSPVVLSLERLVGPQDATHCSPGLSCRLWDSDILCLPGDIVPAPGPVLAPTHLQTELVLRCQKETDCDLCLRVAVHLAVHGHWEEPEDEEKFGGAADLGVEEPRNASLQAQVVLSFQAYPTARCVLLEVQVPAALVQFGQSVGSVVYDCFEAALGSEVRIWSYTQPRYEKELNHTQQLPDCRGLEVWNSIPSCWALPWLNVSADGDNVHFGLSLYWNQVQGPPKPRWHKNLTGPQIITLNHTDLVPCLCIQVWPLEPDSVRTNICPFREDPRAHQNLWQAARLRLLTLQSWLLDAPCSLPAEAALCWRAPGGDPCQPLVPPLSWENVTVDKVLEFPLLKGHPNLCVQVNSSEKLQLQECLWADSLGPLKDDVLLLETRGPQDNRSLCALEPSGCTSLPSKASTRAARLGEYLLQDLQSGQCLQLWDDDLGALWACPMDKYIHKRWALVWLACLLFAAALSLILLLKKDHAKGWLRLLKQDVRSGAAARGRAALLLYSADDSGFERLVGALASALCQLPLRVAVDLWSRRELSAQGPVAWFHAQRRQTLQEGGVVVLLFSPGAVALCSEWLQDGVSGPGAHGPHDAFRASLSCVLPDFLQGRAPGSYVGACFDRLLHPDAVPALFRTVPVFTLPSQLPDFLGALQQPRAPRSGRLQERAEQVSRALQPALDSYFHPPGTPAPGRGVGPGAGPGAGDGT

SEQ ID NO: 464 - protein, 48 aa, Homo sapiens [sequence omitted]

SEQ ID NO: 465 - protein, 549 aa, Homo sapiens [sequence omitted]

SEQ ID NO: 466 - protein, 467 aa, Homo sapiens
MLLLLLLPLLWGRERVEGQKSNRKDYSLTMQSSVTVQEGMCVHVRCSFSYPVDSQTDSDPVHGYWFRAGNDISWKAPVATNNPAWAVQEETRDRFHLLGDPQTKNCTLSIRDARMSDAGRYFFRMEKGNIKWNYKYDQLSVNVTALTHRPNILIPGTLESGCFQNLTCSVPWACEQGTPPMISWMGTSVSPLHPSTTRSSVLTLIPQPQHHGTSLTCQVTLPGAGVTTNRTIQLNVSYPPQNLTVTVFQGEGTASTALGNSSSLSVLEGQSLRLVCAVDSNPPARLSWTWRSLTLYPSQPSNPLVLELQVHLGDEGEFTCRAQNSLGSQHVSLNLSLQQEYTGKMRPVSGVLLGAVGGAGATALVFLSFCVIFIVVRSCRKKSARPAADVGDIGMKDANTIRGSASQGNLTESWADDNPRHHGLAAHSSGEEREIQYAPLSFHKGEPQDLSGQEATNNEYSEIKIPK

SEQ ID NO: 467 - protein, 325 aa, Homo sapiens
MGSQVSSMLKLALQNCCPQLWQRHSARDRQCARVLADERSPQPGASPQEDIANFQVLVKILPVMVTLVPYWMVYFQMQSTYVLQGLHLHIPNIFPANPANISVALRAQGSSYTIPEAWLLLANVVVVLILVPLKDRLIDPLLLRCKLLPSALQKMALGMFFGFTSVIVAGVLEMERLHYIHHNETVSQQIGEVLYNAAPLSIWWQIPQYLLIGISEIFASIPGLEFAYSEAPRSMQGAIMGIFFCLSGVGSLLGSSLVALLSLPGGWLHCPKDFGNINNCRMDLYFFLLAGIQAVTALLFVWIAGRYERASQGPASHSRFSRDRG

SEQ ID NO: 468 - protein, 98 aa, Homo sapiens
MHCCQLPWRCAQAPQEAFLLCLLFLILVLVLLGCSRGLPGHTPWRLHPAAAALLAPLLHDALGACGFQGPEYLLPCLLPLPKPGQLQGPWGPLWALLP

SEQ ID NO: 469 - protein, 608 aa, Homo sapiens
  SITE (265): Xaa equals any of the naturally occurring L-amino acids
  SITE (597): Xaa equals any of the naturally occurring L-amino acids
MVGTKLRQTKDALFTILHDLRPQDRFSIIGFSNRIKVWKDHLISVTPDSIRDGKVYIHHMSPTGGTDINGVLQRAIRLLNKYVAHSGIGDRSVSLIVFLTDGKPTVGETHTLKILNNTREAARGQVCIFTIGIGNDVDFRLLEKLSLENCGLTRRVHEEEDAGSQLIGFYDEIRTPLLSDIRIDYPPSSVVQATKTLFPNYFNGSEIIIAGKLVDRKLDHLHVEVTASNSKKFIILKTDVPVRPQKAGKDVTGSPRPGGDGEGDXNHIERLWSYLTTKELLSSWLQSDDEPEKERLRQRAQALAVSYRFLTPFTSMKLRGPVPRMDGLEEAHGMSAAMGPEPVVQSVRGAGTQPGPLLKKPYQPRIKISKTSVDGDPHFVVDFPLSRLTVCFNIDGQPGDILRLVSDHRDSGVTVNGELIGAPAPPNGHKKQRTYLRTITILINKPERSYLEITPSRVILDGGDRLVLPCNQSVVVGSWGLEVSVSANANVTVTIQGSIAFVILIHLYKKPAPFQRHHLGFYIANSEGLSSNCHGLLGQFLNQDARLTEDPAGPSQNLTHPLLLQVGEGPEAVLTVKGHQVPVVWKQRKIYNGEEQXDCWFARNMPPN

SEQ ID NO: 470 - protein, 56 aa, Homo sapiens
MFYKLTLILCELSVAGVTQAASQRPLQRLPRHICSQRSSSWEMPPQGPAPDHVGRA

SEQ ID NO: 471 - protein, 540 aa, Homo sapiens
  SITE (137): Xaa equals any of the naturally occurring L-amino acids
MVRTDGHTLSEKRNYQVTNSMFGASRKKFVEGVDSDYHDENMYYSQSSMFPHRSEKDMLASPSTSGQLSQFGASLYGQQSALGLPMRGMSNNTPQLNRSLSQGTQLPSHVTPTTGVPTMSLHTPPSPSRGILPMNPXNMMNHSQVGQGIGIPSRTNSMSSSGLGSPNRSSPSIICMPKQQPSRQPFTVNSMSGFGMNRNQAFGMNNSLSSNIFNGTDGSENVTGLDLSDFPALADRNRREGSGNPTPLINPLAGRAPYVGMVTKPANEQSQDFSIHNEDFPALPGSSYKDPTSSNDDSKSNLNTSGKTTSSTDGPKFPGDKSSTTQNNNQQKKGIQVLPDGRVTNIPQGMVTDQFGMIGLLTFIRAAETDPGMVHLALGSDLTTLGLNLNSPENLYPKFASPWASSPCRPQDIDFHVPSEYLTNIHIRDKLAAIKLGRYGEDLLFYLYYMNGGDVLQLLAAVELFNRDWRYHKEERVWITRAPGMEPTMKTNTYERGTYYFFDCLNWRKVAKEFHLEYDKLEERPHLPSTFNYNPAQQAF

SEQ ID NO: 472 - protein, 99 aa, Homo sapiens
MLFFLSLFLSLLLTLSLPSFLPFSFFFFSLFPHLSACLLPSLPSPPFPLPPSLPSFLPSFLPSFLPSLLSPSFPAFFPSFCQLARRSPRKSTQMLQSTS

SEQ ID NO: 473 - protein, 66 aa, Homo sapiens
MNYIFLLMALPHLIAIALTWGRYSFSCLANKETEFQRCQVTCLLHTLGVLMFNFELRSIWLESSLH

SEQ ID NO: 474 - protein, 72 aa, Homo sapiens
MRHTCIVNIAASLLVANTWFIVVAAIQDNRYILCKTACVAATFFIHFFYLSVFFWMLTLGPHAVLSPGFHSA

SEQ ID NO: 475 - protein, 41 aa, Homo sapiens
MLQRGQHLYLVVFLMVSFIPLLNPKQDLKKLKKNRTVRNHF

SEQ ID NO: 476 - protein, 41 aa, Homo sapiens
MPPKQIPLTSLSLLALLLFFFFKIFCLLFLFYPLPDESEHF

SEQ ID NO: 477 - protein, 355 aa, Homo sapiens
  SITE (331): Xaa equals any of the naturally occurring L-amino acids
  SITE (338): Xaa equals any of the naturally occurring L-amino acids
  SITE (345): Xaa equals any of the naturally occurring L-amino acids
MAQLEGYYFSAALSCTFLVSCLLFSAFSRALREPYMDEIFHLPQAQRYCEGHFSLSQWDPMITTLPGLYLVSIGVIKPAIWIFGWSEHVVCSIGMLRFVNLLFSVGNFYLLYLLFCKVQPRNKAASSIQRVLSTLTLAVFPTLYFFNFLYYTEAGSMFFTLFAYLMCLYGNHKTSAFLGFCGFMFRQTNIIWAVFCAGNVIAQKLTEAWKTELQKKEDRLPPIKGPFAEFRKILQFLLAYSMSFKNLSMLLLLTWPYILLGFLFCAFVVVNGGIVIGDRSSHEACLHFPQLFYFFSFTLFFSFPHLLSPSKIKTFPFLSLGNVEFCFLVVXLVLCGFXVWEIPIXGSRNTCLADQ

SEQ ID NO: 478 - protein, 46 aa, Homo sapiens [sequence omitted]

SEQ ID NO: 479 - protein, 47 aa, Homo sapiens
MLISVDSNVPVVFLLLFILVILCHMECKGHIYICVCVCVYMYIFKNI

SEQ ID NO: 480 - protein, 121 aa, Homo sapiens
MHRSEPFLKMSLLILLFLGLAEACTPREVNLLKGIIGLMSRLSPDEILGLLSLQVLHEETSGCKEEVKPFSGTTPSRKPLPKRKNTWNFLKCAYMVMTYLFVSYNKGDWFTFSSQVLLPLL

SEQ ID NO: 481 - protein, 87 aa, Homo sapiens
MTAWILLPVSLSAFSITGIWTVYAMAVMNHHVCPVENWSYNESCPPDPAEQGGPKTCCTLDDVPLISGPDLPPALRAAPGAESALLG

SEQ ID NO: 482 - protein, 116 aa, Homo sapiens
  SITE (46): Xaa equals any of the naturally occurring L-amino acids
MPGGTRCRVLLLSLTFGTSMACGNVGLRLCPWTWHNWLLPPHLCSXWPCRRCCWAAATTHFSWPPWVRSAWGPPAAWLESSGHPLPAVASCSQPPASADSSRFSKVPCCRRRGWTR

SEQ ID NO: 483 - protein, 86 aa, Homo sapiens
MPWHVCFFLSGLLFPSPQTSLQHLCLLTSLILGVTISAYEHAINLPSLQNSLLTSHPSVAALSLLSSSLQQNSLKELLAGHSGSLL

SEQ ID NO: 484 - protein, 10 aa, Homo sapiens
GLLYIMYCNI

SEQ ID NO: 485 - protein, 45 aa, Homo sapiens
MVKWIILSCLILKGKRTLNSSTFYAANKSSTINRNLSWQALPFTH

SEQ ID NO: 486 - protein, 38 aa, Homo sapiens
MLKLATILLTLLLKNLDAGLTDKLSRSNFITDFILTKY

SEQ ID NO: 487 - protein, 43 aa, Homo sapiens
MFNLSFFTLYGLCMLKLHSASSWFTLLLLISLFLSVVYCQSTN

SEQ ID NO: 488 - protein, 44 aa, Homo sapiens
MPCHGLLAQGLSLAPLPPWALCCVGVSRALQDIQQHPRPPAPCQ

SEQ ID NO: 489 - protein, 53 aa, Homo sapiens
MAALLLAGICILLNGVIPQDQSIVRTSLAVLGKGCLAASFNCIFLYTGNCIPQ

SEQ ID NO: 490 - protein, 34 aa, Homo sapiens
MQARWFHILGMMMFIWSSAHQYKCPCYSRQSQEK

SEQ ID NO: 491 - protein, 68 aa, Homo sapiens
MVHNCLLLLKFLLLFCFPLISYQLMNGSLQSLQRLRMIQNVQCIVLNKQEAEFLMGISFQIYDWSLGF

SEQ ID NO: 492 - protein, 162 aa, Homo sapiens [sequence omitted]

SEQ ID NO: 493 - protein, 67 aa, Homo sapiens
MQPACLAPCLDALTSFCLGLLKLTFCLAFFPSGVLEGECSFFTMSRSLSHPRTLHRYTTERPAHSRH

SEQ ID NO: 494 - protein, 47 aa, Homo sapiens
MLLFSSRFIMFLWPPVSGVCLSFIRDRSFLPMCHFIYVLILCNSIAL

SEQ ID NO: 495 - protein, 58 aa, Homo sapiens
MTAMSIHLFCTALSCGSSGQCNKAIKRNKISNDWKDVNVSSFIENMIHRYTYTNALNS

SEQ ID NO: 496 - protein, 292 aa, Homo sapiens
MLRVLCLLRPWRPLRARGCASDGAAGGSEIQVRALAGPDQGITEILMNRPSARNALGNVFVSELLETLAQLREDRQVRVLLFRSGVKGVFCAGADLKEREQMSEAEVGVFVQRLRGLMNDIAAFPAPTIAAMDGFALGGGLELALACDLRVAASSAVMGLIETTRGLLPGAGGTQRLPRCLGVALAKELIFTGRRLSGTEAHVLGLVNHAVAQNEEGDAAYQRARALAQEILPQAPIAVRLGKVAIDRGTEVDIASGMAIEGMCYAQNIPTRDRLEGMAAFREKRTPKFVGK

SEQ ID NO: 497 - protein, 121 aa, Homo sapiens
MIMAQKIGGLTWWAIMFIILFEITGTSSSFLRINALPHFSMNRCGEAYFPFSYLYTSLQKQFLMKVSGIVKNLRGNDDWRCFGVFFCIHFLMRKVLNVVQVRPNYYLTIIGRFYVSVKVFK

SEQ ID NO: 498 - protein, 166 aa, Homo sapiens [sequence omitted]

SEQ ID NO: 499 - protein, 79 aa, Homo sapiens
MLSLDFLDDVRRMNKRQVSLSVLFFSWLFLSLRGCCCGARRTPGFWCEGLSWSDTRVIRFLWRLWPEAALSASLFLTPN

SEQ ID NO: 500 - protein, 50 aa, Homo sapiens
MYIYLIHLCMCVYIYIYILLIIYTLDPEPPSWSPKLDSHLSLRQPSNDRF

SEQ ID NO: 501 - protein, 106 aa, Homo sapiens [sequence omitted]

SEQ ID NO: 502 - protein, 112 aa, Homo sapiens
  SITE (69): Xaa equals any of the naturally occurring L-amino acids
MPVLPGRTTALLSLTLAFAVPCSGVEAGPCVPRSHGCSSWEASVCVTSSTPGGSWRARALFPSAAWHRXAAWDSPWTQTGDFARGAMGGAGALPGGCVCISGRPRAQKLPAL

SEQ ID NO: 503 - protein, 49 aa, Homo sapiens
MIDICHSLRREHFLLWSFLGLFYWAVNGKSVCVSLLHPKHLGKNESLLI

SEQ ID NO: 504 - protein, 44 aa, Homo sapiens
  SITE (11): Xaa equals any of the naturally occurring L-amino acids
  SITE (34): Xaa equals any of the naturally occurring L-amino acids
MVLHCIAWLQXGISFLFLFLCVIAIGATNFASPXFYKLVSSGVA

SEQ ID NO: 505 - protein, 89 aa, Homo sapiens
  SITE (12): Xaa equals any of the naturally occurring L-amino acids
  SITE (13): Xaa equals any of the naturally occurring L-amino acids
  SITE (72): Xaa equals any of the naturally occurring L-amino acids
MSGGLSFLLLVXXGTQSPLHLAGSCPGQTHLSFPLGQDRGQQLQQKQQDLEQEGLEATQGLLAGEWAPPLWXLGSLFQAFVKRESQAYA

SEQ ID NO: 506 - protein, 51 aa, Homo sapiens
MERLVLSLWSLTCRASPANTHPRTTSRTRTLDVKTKCPVEAVKLSEMLPPV

SEQ ID NO: 507 - protein, 508 aa, Homo sapiens [sequence omitted]

SEQ ID NO: 508 - protein, 77 aa, Homo sapiens
  SITE (69): Xaa equals any of the naturally occurring L-amino acids
MTGQIPRLSKVNLFTLLSLWMELFPAEAQRQKSQKNEEGKHGPLGDNEERTRVSTDKRQDYWEQLRCLXERFTITAG

SEQ ID NO: 509 - protein, 108 aa, Homo sapiens
MKALCLLLLPVLGLLVSSKTLCSMEEAINERIQEVAGSLIFRAISSIGLECQSVTSRGDLATCPRGFAVTGCTCGSACGSWDVRAETTCHCQCAGMDWTGARCCRVQP

SEQ ID NO: 510 - protein, 44 aa, Homo sapiens
MRLRNGTVATALAFITSFLTLSWYTTWQNGKGKENDSENVHEMY

SEQ ID NO: 511 - protein, 327 aa, Homo sapiens [sequence omitted]

SEQ ID NO: 512 - protein, 91 aa, Homo sapiens
MGDKLGMARAPSVALAQLWLICLCPESLASFVQAVPWKVLQPSSNRSTDCSPHMRPTCETLGSRKAQDLVLDTMCLSTDDCQGLICRGHRS

SEQ ID NO: 513 - protein, 243 aa, Homo sapiens
MGTLPWLLAFFILGLQAWDTPTIVSRKEWGARPLACRALLTLPVAYIITDQLPGMQCQQQSVCSQMLRGLQSHSVYTIGWCDVAYNFLVGDDGRVYEGVGWNIQGLHTQGYNNISLGIAFFGNKISSSPSPAALSAAEGLISYAIQKGHLSPRYIQPLLLKEETCLDPQHPVMPRKVCPNIIKRSAWEARETHCPKMNLPAKYVIIIHTAGTSCTVSTDCQTVVRNIQSFHMDTRNFCDIGYQ

SEQ ID NO: 514 - protein, 301 aa, Homo sapiens
MARHGLPLLPLLSLLVGAWLKLGNGQATSMVQLQGGRFLMGTNSPDSRDGEGPVREATVKPFAIDIFPVTNKDFRDFVREKKYRTEAEMFGWSFVFEDFVSDELRNKATQPMKSVLWWLPVEKAFWRQPAGPGSGIRERLEHPVLHVSWNDARAYCAWRGKRLPTEEEWEFAARGGLKGQVYPWGNWFQPNRTNLWQGKFPKGDKAEDGFHGVSPVNAFPAQNNYGLYDLLGNVWEWTASPYQAAEQDMRVLRGASWIDTADGSANHRARVTTRMGNTPDSASDNLGFRCAADAGRPPGEL

SEQ ID NO: 515 - protein, 438 aa, Homo sapiens
MPCTCTWRNWRQWIRPLVAVIYLVSIVVAVPLCVWELQKLEVGIHTKAWFIAGIFLLLTIPISLWVILQHLVHYTQPELQKPIIRILWMVPIYSLDSWIALKYPGIAIYVDTCRECYEAYVIYNFMGFLTNYLTNRYPNLVLILEAKDQQKHFPPLCCCPPWAMGEVLLFRCKLGVLQYTVVRPFTTIVALICELLGIYDEGNFSFSNAWTYLVIINNMSQLFAMYCLLLFYKVLKEELSPIQPVGKFLCVKLVVFVSFWQAVVIALLVKVGVISEKHTWEWQTVEAVATGLQDFIICIEMFLAAIAHHYTFSYKPYVQEAEEGSCFDSFLAMWDVSDIRDDISEQVRHVGRTVRGHPRKKLFPEDQDQNEHTSLLSSSSQDAISIASSMPPSPMGHYQGFGHTVTPQTTPTTAKISDEILSDTIGEKKEPSDKSVDS

SEQ ID NO: 516 - protein, 107 aa, Homo sapiens
MVRYTYSMLSVIGISYAVLTWLSQTLWMPIYPLCVLAEAFAIYQSLPYFESFGTYSTKLPFDLSIYFPYVLKIYLMMLFIGMYFTYSHLYSERRDILGIFPIKKKKM

SEQ ID NO: 517 - protein, 234 aa, Homo sapiens
MRIRFTSPHPKDFPDEVLQLIHERDNICKQIHLPAQSGSSRVLEAMRRGYSREAYVELVHHIRESIPGVSLSSDFIAGFCGETEEDHVQTVSLLREVQYNMGFLFAYSMRQKTRAYHRLKDDVPEEVKLRRLEELITIFREEATKANQTSVGCTQLVLVEGLSKRSATDLCGRNDGNLKVIFPDAEMEDVNNPGLRVRAQPGDYVLVKITSASSQTLRGHVLCRTTLRDSSAYC

SEQ ID NO: 518 - protein, 470 aa, Homo sapiens
MWFTYLLLYLHSVRAYSSRGAGLLLLLGQVADGLCTPLVGYEADRAASCCARYGPRKAWHLVGTVCVLLSFPFIFSPCLGCGAATPEWAALLYYGPFIVIFQFGWASTQISHLSLIPELVTNDHEKVELTALRYAFTVVANITVYGAAWLLLHLQGSSRVEPTQDISISDQLGGQDVPVFRNLSLLVVGVGAVFSLLFHLGTRERRRPHAEEPGEHTPLLAPATAQPLLLWKHWLREPAFYQVGILYMTTRLIVNLSQTYMAMYLTYSLHLPKKFIATIPLVMYLSGFLSSFLMKPINKCIGRNMTYFSGLLVILAFAAWVALAEGLGVAVYAAAVLLGAGCATILVTSLAMTADLIGPHTNSGAFVYGSMSFLDKVANGLAVMAIQSLHPCPSELCCRACVSFYHWAMVAVTGGVGVAAALCLCSLLLWPTRLRRSRGGEHRTPSEGEGISTAPPPCWNETQPQGGAKL

SEQ ID NO: 519 - protein, 260 aa, Homo sapiens
MAGSPLLWGPRAGGVGLLVLLLLGLFRPPPALCARPVKEPRGLSAASPPLAETGAPRRFRRSVPRGEAAGAVQDLARALAHLLEAERQERARAEAQEAEDQQARVLAQLLRVWGAPRNSDPALGLDDDPDAPAAQLARALLRARLDPAALAAQLVPAPVPAAALRPRPPVYDDGPAGPDAEEAGDETPDVDPELLRYLLGRILAGSADSEGVAAPRRLRRAADHDVGSELPPEGVLGALLRVKRLETPAPQVPARRLLPP

SEQ ID NO: 520 - protein, 95 aa, Homo sapiens
MHLCICAVWVLVALLRMHGASPAQTSGTRSGNGGCRRHGAGQGRGAATQPLRPPRGTASGQLMALLSALLPRLSGSSTPMMAHGRPAPPQWSRVS

SEQ ID NO: 521 - protein, 41 aa, Homo sapiens
MNLSFLSFFLFFYLLWSPAESVYKKGMVKKNLSHSIVEKIK

SEQ ID NO: 522 - protein, 163 aa, Homo sapiens
MGSTWGSPGWVRLALCLTGLVLSLYALHVKAARARDRDYRALCDVGTAISCSRVFSSRWGRGFGLVEHVLGQDSILNQSNSIFGCIFYTLQLLLGCLRTRWASVLMLLSSLVSLAGSVYLAWILFFVLYDFCIVCITTYAINVSLMWLSFRKVQEPQGKAKRH

SEQ ID NO: 523 - protein, 113 aa, Homo sapiens
  SITE (38): Xaa equals any of the naturally occurring L-amino acids
MRPLLLGGYWVLCLSVLGHAALYHFWLREEGKGPPQVXSVLALALPAGSCAPGLPFPGPLIPTQLLFALEWGTPTPLRDHPPHSMHSAPQNPPVFLGTHTCPPSWYFRLIPQA

SEQ ID NO: 524 - protein, 161 aa, Homo sapiens
MALSLTLCFVMFWTPNVSEKILIDIIGVDFAFAELCVVPLRIFSFFPVPVTVRAHLTGWLMTLKKTFVLAPSSVLRIIVLIASLVVLPYLGVHGATLGVGSLLAGFVGESTMVAIAACYVYRKQKKKMENESATEGEDSAMTDMPPTEEVTDIVEMREENE

SEQ ID NO: 525 - protein, 348 aa, Homo sapiens
MNMTQARVLVAAVVGLVAVLLYASIHKIEEGHLAVYYRGGALLTSPSGPGYHIMLPFITTFRSVQTTLQTDEVKNVPCGTSGGVMIYIDRIEVVNMLAPYAVFDIVRNYTADYDKTLIFNKIHHELNQFCSAHTLQEVYIELFDQIDENLKQALQKDLNLMAPGLTIQAVRVTKPKIPEAIRRNFELMEAEKTKLLIAAQKQKVVEKEAETERKKAVIEAEKIAQVAKIRFQQKVMEKETEKRISEIEDAAFLAREKAKADAEYYAAHKYATSNKHKLTPEYLELKKYQAIASNSKIYFGSNIPNMFVDSSCALKYSDIRTGRESSLPSKEALEPSGENVIQNKESTG

SEQ ID NO: 526 - protein, 44 aa, Homo sapiens
MPLCGLYCLRILMFPLRSANSVPLQCLPPSSLANKDSHFRAPRK

SEQ ID NO: 527 - protein, 50 aa, Homo sapiens
MPGILAGIPVKDLCLSLLQGFRLLLLCVCPGWLSGWMGGQKGSPRIVDIG

SEQ ID NO: 528 - protein, 206 aa, Homo sapiens
  SITE (143): Xaa equals any of the naturally occurring L-amino acids
MASHGLCPCLLMGTGWGLWTLLPDLEVMAGKGRMPFAGISVTSGFLRSLKRAPLPHTGSPDPRPSGIWSGVRTTSEEAGATSTQISTAAPRFHSRRKGPKRNLAPQLRVLVHRTVPPGQLVYAPQTVDSLRGTLLRPPAWLLXQVPCFYSGQPLLVSASVLCRDLMQFLFLLKSYLLPFLEVCRIGWEQIQRILGAGLWRQKEGNG

SEQ ID NO: 529 - protein, 190 aa, Homo sapiens
MPVPTLCLLWALAMVTRPASAAPMGGPELAQHEELTLLFHGTLQLGQALNGVYRTTEGRLTKARNSLGLYGRTIELLGQEVSRGRDAAQELRASLLETQMEEDILQLQAEATAEVLGEVAQAQKVLRDSVQRLEVQLRSAWLGPAYREFEVLKAHADKQSHILWALTGHVQRQRREMVAQQHRLRQIQER

SEQ ID NO: 530 - protein, 75 aa, Homo sapiens [sequence omitted]

SEQ ID NO: 531 - protein, 97 aa, Homo sapiens [sequence omitted]

SEQ ID NO: 532 - protein, 187 aa, Homo sapiens
  SITE (167): Xaa equals any of the naturally occurring L-amino acids
MGFFLVLVMEQITLAYKEQSGPSPLEETRALLGTVNGGPQHWHDGPGVPQASGAPATPSALRACVLVFSLALHSVFEGLAVGLQRDRARAMELCLALLLHKGILAVSLSLRLLQSHLRAQVVAGCGILFSCMTPLGIGLGAALAESAGPLHQLAQSVLEGMAAGTFXYITFLEILLFHPKFKGVSRR

SEQ ID NO: 533 - protein, 298 aa, Homo sapiens
  SITE (87): Xaa equals any of the naturally occurring L-amino acids
MFFFFDSVQVVFTICTAVLATIAFAFLLLPMCQYLTRPCSPQNKISFGCCGRFTAAELLSFSLSVMLVLIWVLTGHWLLMDALAMGXCVAMIAFVRLPSLKVSCLLLSGLLIYDVFWVFFSAYIFNSNVMVKVATQPADNPLDVLSRKLHLGPNVGRDVPRLSLPGKLVFPSSTGSHFSMLGIGDIVMPGLLLCFVLRYDNYKKQASGDSCGAPGPANISGRMQKVSYFHCTLIGYFVGLLTATVASRIHRAAQPALLYLVPFTLLPLLTMAYLKGDLRRMWSEPFHSKSSSSRFLEV

SEQ ID NO: 534 - protein, 232 aa, Homo sapiens
  SITE (36): Xaa equals any of the naturally occurring L-amino acids
  SITE (67): Xaa equals any of the naturally occurring L-amino acids
  SITE (70): Xaa equals any of the naturally occurring L-amino acids
  SITE (71): Xaa equals any of the naturally occurring L-amino acids
  SITE (82): Xaa equals any of the naturally occurring L-amino acids
  SITE (92): Xaa equals any of the naturally occurring L-amino acids
MAISIPNRIFPITALTLLALVYSLVLLLPFYNCTEXTKYRRFPDWLDHWMLCRKQLGLVALGFAFLXVLXXLVIPIRYYVRXRLGNLTVTQXILKKENPFSTSSAWLSDSYVALGILGFFLFVLLGITSLPSVSNAVNWREFRFVQSKLGYLTLILCTAHTLVYGGKRFLSPSNLRWYLPAAYVLGLIIPCTVLVIKFVLIMPCVDNTLTRIRRAGKGTQNTRKSIEWKINI

SEQ ID NO: 535 - protein, 58 aa, Homo sapiens
MEPWSWFFFFFFFFPQRTCGCALCVLFLFSIWGPHGKELLNSFLYELPLCSYKGPFLS

SEQ ID NO: 536 - protein, 46 aa, Homo sapiens
MTLSLQLAELVHFVCAFQSQWTGVYPMMPPLKPTEPLCFACVPCRV

SEQ ID NO: 537 - protein, 77 aa, Homo sapiens
MSVWPRSTLLFCLLSLSTGLFLDKLGIIIPILLCGWKVKCDNDVCEMPAQCLEVLKNYLLPFLFLPTTYPLPPGATC

SEQ ID NO: 538 - protein, 83 aa, Homo sapiens
MASPGWHLSCRPTGLVSIFLLCAPAYLHSFVMTSITLISTKICSPTKLRHRTHFLYGSIMELYPTLTFPMTTDVENLNLDSSR

SEQ ID NO: 539 - protein, 73 aa, Homo sapiens
  SITE (24): Xaa equals any of the naturally occurring L-amino acids
MGFWCGCPFCLLVFLLTVRTRSFXSVGVCWRSTPDPLCLGISSRSCRTADIGEQQMLLPDRSSGSFVSEYPAM

SEQ ID NO: 540 - protein, 152 aa, Homo sapiens
  SITE (66): Xaa equals any of the naturally occurring L-amino acids
  SITE (77): Xaa equals any of the naturally occurring L-amino acids
  SITE (81): Xaa equals any of the naturally occurring L-amino acids
  SITE (84): Xaa equals any of the naturally occurring L-amino acids
  SITE (86): Xaa equals any of the naturally occurring L-amino acids
  SITE (87): Xaa equals any of the naturally occurring L-amino acids
  SITE (93): Xaa equals any of the naturally occurring L-amino acids
  SITE (103): Xaa equals any of the naturally occurring L-amino acids
  SITE (110): Xaa equals any of the naturally occurring L-amino acids
MDHSPTTGVVTVIVILIAIAALGAFDPGLLVLPAAAAHQPVRGRGEHRGGWGDQGTLPAGAVFGQXTVRGEKGQADXSQTXRKXTXXPGCKGXLVPVCKPAKXGLGGAKXIRMRCCLRGRADTCWHGLCGFRPSHALMPGDLAVLGFPSASR

SEQ ID NO: 541 - protein, 88 aa, Homo sapiens
MVAGFVFYLGVFVVCHQLSSSLNATYRSLVAREKVFWDLAATRAVFGVQSTAAAVGSAGGPCAACRQGAWPAELVLVSHHDSNGILLL

SEQ ID NO: 542 - protein, 340 aa, Homo sapiens
MALRLLRRAARGAAAAALLRLKASLAADIPRLGYSSSSHHKYIPRRAVLYVPGNDEKKIKKIPSLNVDCAVLDCEDGVAANKKNEARLRIVKTLEDIDLGPTEKCVRVNSVSSGLAEEDLETLLQSRVLPSSLMLPKVESPEEIQWFADKFSFHLKGRKLEQPMNLIPFVETAMGLLNFKAVCEETLKVGPQVGLFLDAVVFGGEDFRASIGATSSKETLDILYARQKIVVIAKAFGLQAVDLVYIDFRDGAGLLRQSREGAAMGFTGKQVIHPNQIAVVQEQFSPSPEKIKWAEELIAAFKEHQQLGKGAFTFQGSMIDMPLLKQAQNTVTLATSIKEK

SEQ ID NO: 543 - protein, 64 aa, Homo sapiens
MVRHIRERRRQPLAFQRVLLSLCLLEGIWHSPAAAAGGGSHCSSWPSLYTTFQRVSLLELDLGL

SEQ ID NO: 544 - protein, 44 aa, Homo sapiens
  SITE (16): Xaa equals any of the naturally occurring L-amino acids
MCLPLLHCTGALWGKXVLLFLYCLAQSFAYSRHQTVGLVVHDYW

SEQ ID NO: 545 - protein, 221 aa, Homo sapiens
  SITE (184): Xaa equals any of the naturally occurring L-amino acids
MAGGVRPLRGLRALCRVLLFLSQFCILSGGESTEIPPYVMKCPSNGLCSRLPADCIDCTTNFSCTYGKPVTFDCAVKPSVTCVDQDFKSQKNFIINMTCRFCWQLPETDYECTNSTSCMTVSCPRQRYPANCTVRDHVHCLGNRTFPKMLYCNWTGGYKWSTALALSITLGGFGADRFYLGQWXEGLGKLFSFGGLGIWTLIDVLLIGVGYVGPADGSLYI

SEQ ID NO: 546 - protein, 39 aa, Homo sapiens
MWLTQPESLSLCVSVSQDWAHILALSITMLWDFREFPHL

SEQ ID NO: 547 - protein, 62 aa, Homo sapiens [sequence omitted]

SEQ ID NO: 548 - protein, 64 aa, Homo sapiens
MVSPLISALFHVPFLWLGMFFPHSLSGPFPSHLRRASSSRKPLVKPPRARQYPPLASSGYRGRI

SEQ ID NO: 549 - protein, 62 aa, Homo sapiens
MKNSTSLLYKLFSSLSVFIFKFLLLFYTLHIALGVKIQYKPLAHFIDHSCIQQVSQVQWSIP

SEQ ID NO: 550 - protein, 49 aa, Homo sapiens
MAPRNQGSFSFGNFMLFLVLIERRYLPFLSPILFCCSTHNRSAVTATNL

SEQ ID NO: 551 - protein, 957 aa, Homo sapiens [sequence omitted]

SEQ ID NO: 552 - protein, 139 aa, Homo sapiens
MALGIQKRFSPEVLGLCASTALVWVVMEVLALLLGLYLATVRSDLSTFHLLAYSGYKYVGMILSVLTGLLFGSDGYYVALAWTSSALMYFIVRSLRTAALGPDSMGGPVPRQRLQLYLTLGAAAFQPLIIYWLTFHLVR

SEQ ID NO: 553 - protein, 42 aa, Homo sapiens
MRKEEGIAHLSIAFFVQVLCLYQLLPVILPQFNLGSGKNMNR

SEQ ID NO: 554 - protein, 121 aa, Homo sapiens
  SITE (30): Xaa equals any of the naturally occurring L-amino acids
  SITE (32): Xaa equals any of the naturally occurring L-amino acids
  SITE (87): Xaa equals any of the naturally occurring L-amino acids
  SITE (101): Xaa equals any of the naturally occurring L-amino acids
  SITE (115): Xaa equals any of the naturally occurring L-amino acids
MCSHSTLIHLYLVLPFFFLFLPSSFPFPSXSXSSILPSLRLPPFFPPSLFLHSSLPPSLSHPLGLSITSSRQSFLDYHHLCTKHLSXTLCGLIYHCLNIFXTRAVMWHMQVSFLXIHWLLP

SEQ ID NO: 555 - protein, 71 aa, Homo sapiens
MRIHFKILVLVIYFILLGSFSDRCSLLDCKSRIQRIFICNILNLSLVSCHLCRYSFDCLTRGKCFPLSFPA

SEQ ID NO: 556 - protein, 68 aa, Homo sapiens [sequence omitted]

SEQ ID NO: 557 - protein, 143 aa, Homo sapiens
MSPFHLLGLKVFLTWALTLAQICLYFFEVQPLGLLALNFFCTATAGLKELCMHPPSLAFTPEFHTSLSPLAIPSFCGTSVSLSNSHTIPLSLYLPFPSKSRMPDTLHLLVHSLPLVHSQVLPVKDVTIEWPLCQRCLGSTCHQ

SEQ ID NO: 558 - protein, 233 aa, Homo sapiens
  SITE (173): Xaa equals any of the naturally occurring L-amino acids
MHRGKLDCAGGALLSSYLIVLMILLAVVICTVSAIMCVSMRGTICNPGPRKSMSKLLYIRLALFFPEMVWASLGAAWVADGVQCDRTVVNGIIATVVVSWIIIAATVVSIIIVFDPLGGKMAPYSSAGPSHLDSHDSSQLLNGLKTAATSVWETRIKLLCCCIGKDDHTRVAXSSTAELFSTYFSDTDLVPSDIAAGLALLHQQQDNIRNNQDLPRWSAMPQGAPRKLIWMQN

SEQ ID NO: 559 - protein, 66 aa, Homo sapiens [sequence omitted]

SEQ ID NO: 560 - protein, 113 aa, Homo sapiens
MGSWCICTLLLLLTDGQQGFYPQPFQAAPGRQQLWGGTNPWAVLIPESFLPYTLTVNYSPSCNFEFYLPKMRLAYICMSHSHCPYLGRDIIITLLNYCSSFLAELLAHLVYIA

SEQ ID NO: 561 - protein, 82 aa, Homo sapiens
  SITE (51): Xaa equals any of the naturally occurring L-amino acids
MLIALFCILFQILFSIPTRIFYIFLINKRVHIFTTYLMSEQKNHDWVRRTXKLHRVWLISGKMLLVADIKALIRWLWGPNPE

SEQ ID NO: 562 - protein, 90 aa, Homo sapiens
  SITE (29): Xaa equals any of the naturally occurring L-amino acids
  SITE (30): Xaa equals any of the naturally occurring L-amino acids
  SITE (65): Xaa equals any of the naturally occurring L-amino acids
MLRCSFSSFLLCHTILLFLGSSAHLLVEXXVWGLYEYRIGDMVDQKATFCVQKQECLFPLGSWVXRVEGGAFAREPPSSTQYFPVSCLYQ

SEQ ID NO: 563 - protein, 36 aa, Homo sapiens
MGCTALLLLFHLCVPCEPYGTHEKELVPGLYFLVYR

SEQ ID NO: 564 - protein, 46 aa, Homo sapiens
MCIPEALGKNSLFLSSTFLWLLAFFGLWSHHSYLEGQHLQICFFFT

SEQ ID NO: 565 - protein, 82 aa, Homo sapiens
MAISCWASLTVKSLYCLLGFWWEAVISSNELPLPWICQEADGNLANSGRYQAPSSAPVTLFYTCGSTTVCSEGQSLPLLCFS

SEQ ID NO: 566 - protein, 57 aa, Homo sapiens
MPPHRQTDGQMGLPAPALWVWGLLLSSSFQTLLPAFPKPPALNLGCSTRPIPSFLKI

SEQ ID NO: 567 - protein, 81 aa, Homo sapiens
  SITE (44): Xaa equals any of the naturally occurring L-amino acids
MRMRVAVAPRPHQHLVVSVSWILAILISVSGYHCFHLQFSYMVXNIFPHVYLSSAYLLRPVICSDLLPVFVCLHVCLCLIF

SEQ ID NO: 568 - protein, 80 aa, Homo sapiens
MCVVCVCVWCMCVCGVCVCLCVCGVCMCISLNEKLAPMIMELTTPKVCRQQAGGPGGPVVWLQPVSEGLRTRRAGGAAAV

SEQ ID NO: 569 - protein, 78 aa, Homo sapiens
  SITE (40): Xaa equals any of the naturally occurring L-amino acids
  SITE (46): Xaa equals any of the naturally occurring L-amino acids
  SITE (60): Xaa equals any of the naturally occurring L-amino acids
MMGNDLLHLVFLQLSLGVASGGWILWPLRRLGGAHTSKDXNKNGHXVHCLVITNEPLVSXKKIGLSSPHTCPSTLQQF

SEQ ID NO: 570 - protein, 53 aa, Homo sapiens
MSTFVCVCVFCFVLRSEARAKRKQDQRNTKRCLLTKGQRDLSVNQSKINRTAN

SEQ ID NO: 571 - protein, 80 aa, Homo sapiens
MALWVTCILSLCTWFSCLYGADSLANKCLSAGATRKAFPFCVLFRDLEVGLGFEGFVTHLACKLFCYCELSDSALSLGHE

SEQ ID NO: 572 - protein, 320 aa, Homo sapiens
MRGSVECTWGWGHCAPSPLLLWTLLLFAAPFGLLGEKTRQLLEFDSTNVSDTAAKPLGRPYPPYSLADFSWNNITDSLDPATLSATFQGHPMNDPTRTFANGSLAFRVQAFSRSSRPAQPPRLLHTADTCQLEVALIGASPRGNRSLFGLEVATLGQGPDCPSMQEQHSIDDEYAPAVFQLDQLLWGSLPSGFAQWRPVAYSQKPGGRESALPCQASPLHPALAYSLPQSPIVRAFFGSQNNFCAFNLTFGASTGPGYWDQHYLSWSMLLGVGFPPVDGLSPLVLGIMAVALGAPGLMLLGGGLVLLLHHKKYSEYQSIN

SEQ ID NO: 573 - protein, 115 aa, Homo sapiens
MLALSSSFLVLSYLLTRWCGSVGFILANCFNMGIRITQSLCFIHRYYRRAPTGPWLACTYRQSCSGHLPSVVGLLLFRRYSSAVSRAGQPDWHTLLWGPSVWEQLSGQHSSQRPS

SEQ ID NO: 574 - protein, 402 aa, Homo sapiens
MYSGNRSGGHGYWDGGGAAGAEGPAPAGTLSPAPLFSPGTYERLALLLGSIGLLGVGNNLLVLVLYYKFQRLRTPTHLLLVNISLSDLLVSLFGVTFTFVSCLRNGWVWDTVGCVWDGFSGSLFGIVSIATLTVLAYERYIRVVHARVINFSWAWRAITYIWLYSLAWAGAPLLGWNRYILDVHGLGCTVDWKSKDANDSSFVLFLFLGCLVVPLGVIAHCYGHILYSIRMLRCVEDLQTIQVIKILKYEKKLAKMCFLMIFTFLVCWMPYIVICFLVVNGHGHLVTPTISIVSYLFAKSNTVYNPVIYVFMIRKFRRSLLQLLCLRLLRCQRPAKDLPAAGSEMQIRPIVMSQKDGDRPKKKVTFNSSSIIFIITSDESLSVDDSDKTNGSKVDVIQVRPL

SEQ ID NO: 575 - protein, 218 aa, Homo sapiens
  SITE (168): Xaa equals any of the naturally occurring L-amino acids
  SITE (174): Xaa equals any of the naturally occurring L-amino acids
  SITE (198): Xaa equals any of the naturally occurring L-amino acids
  SITE (213): Xaa equals any of the naturally occurring L-amino acids
MRALLALCLLLGWLRWGPAGAQQSGEYCHGWVDVQGNYHEGFQCPEDFDTLDATICCGSCALRYCCAAADARLEQGGCTNDRRELEHPGITAQPVYVPFLIVGSIFIAFIILGSVVAIYCCTCLRPKEPSQQPIRFSLRSYQTETLPMILTSTSPRAPSRQSSTATSXSFTGGXIRRFFSAIWFPGVTPVFRLPPSAXAPTGWEELSRLSVPXDTPRP

SEQ ID NO: 576 - protein, 76 aa, Homo sapiens [sequence omitted]

SEQ ID NO: 577 - protein, 89 aa, Homo sapiens
MPVPLLASAAWCHLCAGALPAWLWLPWRAAAAQWHVCASHCLPLHPAFSALGPHPDPGRAGPGAAPRDCAHPELHPLCLPRWSLQLLPR

SEQ ID NO: 578 - protein, 87 aa, Homo sapiens
MMTFFGSHILLFLFCPLKAGHRHLVSSSFLTVAVSISKGPFFHSTAQKRKSRKQLPRPAFLVPLSSQNTQTRTKHHFSFLHLIVLQP

SEQ ID NO: 579 - protein, 41 aa, Homo sapiens
MAVPLFLYIFTLLPLLPFLLSLCFSPLTVKRSSSSESKSSL

SEQ ID NO: 580 - protein, 35 aa, Homo sapiens
IYSSGYFQIYNMLLLTILILLCNRTPELIPGFYIR

SEQ ID NO: 581 - protein, 43 aa, Homo sapiens
MHMPAAPVTVLKLLPFPCVCGLGWVPIGCVSIPSHLKGNLCCS

SEQ ID NO: 582 - protein, 484 aa, Homo sapiens
MPRHLSGLLLLLWPLLLLLPPTPAAPGPLARPGLRRLGTRGPGGSPGRRPVSAVPTRAPYSGAGQPGGARGAGVCRSRPLDLVFIIDSSRSVRPLEFTKVKTFVSQIIDTLDIGAADTRVAVVNYASTVKIEFHLQTHSDKQSLKQAVARITPLSTGTMSGLAIQTAMDEAFTVEAGARGPTSNIPKVAIIVTDGRPQDQVNEVAARARASGIELYAVGVDRADMESLKMMASEPLDEHVFYVETYGVIEKLSSRFQETFCALDPCVLGTHRCQHVCVSDGEGKHHCECSQGYSLNADQKTCSAIDKCALNTHGCEHICVNDRTGSYHCECYEGYTLNQDRKTCSAQDQCAFGTHGCQHICVNDRDGSHHCECYEGYTLNADNKTCSVRSECAGGSHGCQHLCVDDGPAAYHCDCFPGYTLTEDRRTCAAIEEARRLVSTEDACGCEATLAFQERASSYLQRLNAKLDDILGKLQADAYGQIHR

SEQ ID NO: 583 - protein, 184 aa, Homo sapiens
MSRTAYTVGALLLLLGTLLPAAEGKKKGSQGAIPPPDKAQHNDSEQTQSPQQPGSRNRGRGQGRGTAMPGEEVLESSQEALHVTERKYLKRDWCKTQPLKQTIHEEGCNSRTIINRFCYGQCNSFYIPRHIRKEEGSFQSCSFCKPKKFTTMMVTLNCPELQPPTKKKRVTRVKQCRCISIDLD

SEQ ID NO: 584 - protein, 164 aa, Homo sapiens
MTTWSCLVAMIVSGVITAVWAVRAAPIWRSQVKQKMRIGKQGNCRPPRCICSALGLLAPWMAVVLSQLSVRCVVSWVQGKPSSPRPRGSAASPAPGATPPTPRKPVSWLGYRENHRPKKPKSCTRLPGLPKLEPSSTLKGQDSWQMGHQQDKTLWSWASTGGSS

SEQ ID NO: 585 - protein, 56 aa, Homo sapiens [sequence omitted]

SEQ ID NO: 586 - protein, 40 aa, Homo sapiens
MVAMVFLKISVLPLMCRGQTKHKVLRDHAYPRVSQKRGHI

SEQ ID NO: 587 - protein, 967 aa, Homo sapiens
  SITE (40): Xaa equals any of the naturally occurring L-amino acids
  SITE (45): Xaa equals any of the naturally occurring L-amino acids
  SITE (169): Xaa equals any of the naturally occurring L-amino acids
  SITE (293): Xaa equals any of the naturally occurring L-amino acids
  SITE (297): Xaa equals any of the naturally occurring L-amino acids
  SITE (547): Xaa equals any of the naturally occurring L-amino acids
MQRAVPEGFGRRKLGSDMGNAERAPGSRSFGPVPTLLLLXAALLXVSDALGRPSEEDEELVVPELERAPGHGTTRLRLHAFDQQLDLELRPDSSFLAPGFTLQNVGRKSGSETPLPETDLAHCFYSGTVNGDPSSAAALSLCEGVRGAFYLLGEAYFIQPLPAASERLXTAAPGEKPPAPLQFHLLRRNRQGDVGGTCGVVDDEPRPTGKAETEDEDEGTEGEDEGPQWSPQDPALQGVGQPTGTGSIRKKRFVSSHRYVETMLVADQSMAEFHGSGLKHYLLTLFSVAARLXKHPXIRNSVSLVVVKILVIHDEQKGPEVTSNAALTLRNFCNWQKQHNPPSDRDAEHYDTAILFTRQDLCGSQTCDTLGMADVGTVCDPSRSCSVIEDDGLQAAFTTAHELGHVFNMPHDDAKQCASLNGVNQDSHMMASMLSNLDHSQPWSPCSAYMITSFLDNGHGECLMDKPQNPIQLPGDLPGTSYDANRQCQFTFGEDSKHCPDAASTCSTLWCTGTSGGVLVCQTKHFPWADGTSCGEGKWCINGKCVXKTDRKHFDTPFHGSWGMWGPWGDCSRTCGGGVQYTMRECDNPVPKNGGKYCEGKRVRYRSCNLEDCPDNNGKTFREEQCEAHNEFSKASFGSGPAVEWIPKYAGVSPKDRCKLICQAKGIGYFFVLQPKVVDGTPCSPDSTSVCVQGQCVKAGCDRIIDSKKKFDKCGVCGGNGSTCKKISGSVTSAKPGYHDIITIPTGATNIEVKQRNQRGSRNNGSFLAIKAADGTYILNGDYTLSTLEQDIMYKGVVLRYSGSSAALERIRSFSPLKEPLTIQVLTVGNALRPKIKYTYFVKKKKESFNAIPTFSAWVIEEWGECSKSCELGWQRRLVECRDINGQPASECAKEVKPASTRPCADHPCPQWQLGEWSSCSKTCGKGYKKRSLKCLSHDGGVLSHESCDPLKKPKHFIDFCTMAECS

SEQ ID NO: 588 - protein, 41 aa, Homo sapiens
MCVCLICSICQFLWCKYSHYSCFQANIVIPQKMELGRHNQD

SEQ ID NO: 589 - protein, 211 aa, Homo sapiens
MVFLKFFCMSFFCHLCQGYFDGPLYPEMSNGTLHHYFVPDGDYEENDDPEKCQLLFRVSDHRRCSQGEGSQVGSLLSLTLREEFTVLGHQVEDAGRVLEGISKSISYDLDGEESYGKYLRRESHQIGDAYSNSDKSLTELESKFKQGQEQDSRQESRLNEDFLGMLVHTRSLLKETLDISVGLRDKYELLALTIRSHGTRLGRLKNDYLKV

SEQ ID NO: 590 - protein, 53 aa, Homo sapiens
  SITE (49): Xaa equals any of the naturally occurring L-amino acids
MSHHAGLGGGILFSLKISFFIALAVVGGSRGVNDCQLGGCRVGSCPRVXVRVA

SEQ ID NO: 591 - protein, 48 aa, Homo sapiens [sequence omitted]

SEQ ID NO: 592 - protein, 80 aa, Homo sapiens
MFDRCRVTSCSCTCGAGAKWCTHVVALCLFRIHNASAVCLRAPVSESLSRLQRDQLQKFAQYLISELPQQVGEVGTPSCN

SEQ ID NO: 593 - protein, 201 aa, Homo sapiens [sequence omitted]

SEQ ID NO: 594 - protein, 420 aa, Homo sapiens
MAPWPPKGLVPAVLWGLSLFLNLPGPIWLQPSPPPQSSPPPQPHPCHTCRGLVDSFNKGLERTIRDNFGGGNTAWEEENLSKYKDSETRLVEVLEGVCSKSDFECHRLLELSEELVESWWFHKQQEAPDLFQWLCSDSLKLCCPAGTFGPSCLPCPGGTERPCGGYGQCEGEGTRGGSGHCDCQAGYGGEACGQCGLGYFEAERNASHLVCSACFGPCARCSGPEESNCLQCKKGWALHHLKCVDIDECGTEGANCGADQFCVNTEGSYECRDCAKACLGCMGAGPGRCKKCSPGYQQVGSKCLDVDECETEVCPGENKQCENTEGGYRCICAEGYKQMEGICVKEQIPESAGFFSEMTEDELVVLQQMFFGIIICALATLAAKGDLVFTAIFIGAVAAMTGYWLSERSDRVLEGFIKGR

SEQ ID NO: 595 - protein, 102 aa, Homo sapiens
MTVRRLSLLCRDLWALWLLLKAGAVRGARAGPRLPGRCCGATCGDAGRGWTFWAQPCPQRLLGQKPGAGGCRGWVLGWVPPRPEEPCSLAGKVCTGLARWMV

SEQ ID NO: 596 - protein, 53 aa, Homo sapiens
  SITE (11): Xaa equals any of the naturally occurring L-amino acids
MCKAVCKHRLXLFAVSSFSLGLGWVCVLVLMLWPVRLSLAPRPVQLQQRRSHC

SEQ ID NO: 597 - protein, 472 aa, Homo sapiens
MKFLIFAFFGGVHLLSLCSGKAICKNGISKRTFEEIKEEIASCGDVAKAIINLAVYGKAQNRSYERLALLVDTVGPRLSGSKNLEKAIQIMYQNLQQDGLEKVHLEPVRIPHWERGEESAVMLEPRIHKIAILGLGSSIGTPPEGITAEVLVVTSFDELQRRASEARGKIVVYNQPYINYSRTVQYRTQGAVEAAKVGALASLIRSVASFSIYSPHTGIQEYQDGVPKIPTACITVEDAEMMSRMASHGIKIVIQLKMGAKTYPDTDSFNTVAEITGSKYPEQVVLVSGHLDSWDVGQGAMDDGGGAFISWEALSLIKDLGLRPKRTLRLVLWTAEEQGGVGAFQYYQLHKVNISNYSLVMESDAGTFLPTGLQFTGSEKARAIMEEVMSLLQPLNITQVLSHGEGTDINFWIQAGVPGASLLDDLYKYFFFHHSHGDTMTVMDPKQMNVAAAVWAVVSYVVADMEEMLPRS

SEQ ID NO: 598 - protein, 359 aa, Homo sapiens
MKLGCVLMAWALYLSLGVLWVAQMLLAASFETLQCEGPVCTEESSCHTEDDLTDAREAGFQVKAYTFSEPFHLIVSYDWLILQGPAKPVFEGDLLVLRCQAWQDWPLTQVTFYRDGSALGPPGPNREFSITVVQKADSGHYHCSGIFQSPGPGIPETASVVAITVQELFPAPILRAVPSAEPQAGGPMTLSCQTKLPLQRSAARLLFSFYKDGRIVQSRGLSSEFQIPTASEDHSGSYWCEAATEDNQVWKQSPQLEIRVQGASSSAAPPTLNPAPQKSAAPGTAPEEAPGPLPPPPTPSSEDPGFSSPLGMPDPHLYHQMGLLLKHMQDVRVLLGHLLMELRELSGHRKPGTTKATAE

SEQ ID NO: 599 - protein, 379 aa, Homo sapiens
  SITE (283): Xaa equals any of the naturally occurring L-amino acids
  SITE (303): Xaa equals any of the naturally occurring L-amino acids
  SITE (307): Xaa equals any of the naturally occurring L-amino acids
MGYIDDPDKYHQGFELLLSALGDPSERVVSATHQVFLPAYAAWTTELGNLQSHLILTLLNKIEKLLREGEHGLDEHKLHMYLSALQSLIPSLFALVLQNAPFSSKAKLHGEVPQIEVTRFPRPMSPLQDVSTIIGSREQLAVLLQLYDYQLEQEGTTGWESLLWVVNQLLPQLIEIVGKINVTSTACVHEFSRFFWRLCRTFGKIFTNTKVKPQFQEILRLSEENIDSSAGNGVLTKATVPIYATGVLTCYIQEEDRKLLVGFLEDVMTLLSLSHAPLDSLKXSFVELGANQAYHELLLTVLXYGVXHTSALVRCTAARMFELLVKGVNETLVAQRVVPALITLSSDPEISVRIATIPAFGTIMETVIQRELLERVKMQ

SEQ ID NO: 600 - protein, 48 aa, Homo sapiens
MSTVTWLLKLFTQFMFPPTVSNSHTCARYYVFNFCLIISFNFNFHYHW

SEQ ID NO: 601 - protein, 142 aa, Homo sapiens [sequence omitted]

SEQ ID NO: 602 - protein, 399 aa, Homo sapiens
MGILLGLLLLGHLTVDTYGRPILEVPESVTGPWKGDVNLPCTYDPLQGYTQVLVKWLVQRGSDPVTIFLRDSSGDHIQQAKYQGRLHVSHKVPGDVSLQLSTLEMDDRSHYTCEVTWQTPDGNQVVRDKITELRVQKLSVSKPTVTTGSGYGFTVPQGMRISLQCQARGSPPISYIWYKQQTNNQEPIKVATLSTLLFKPAVIADSGSYFCTAKGQVGSEQHSDIVKFVVKDSSKLLKTKTEAPTTMTYPLKATSTVKQSWDWTTDMDGYLGETSAGPGKSLPVFAIILIISLCCMVVFTMAYIMLCRKTSQQEHVYEAARAHAREANDSGETMRVAIFASGCSSDEPTSQNLGNNYSDEPCIGQEYQIIAQINGNYARLLDTVPLDYEFLATEGKSVC

SEQ ID NO: 603 - protein, 223 aa, Homo sapiens
MKFVPCLLLVTLSCLGTLGQAPRQKQGSTGEEFHFQTGGRDSCTMRPSSLGQGAGEVWLRVDCRNTDQTYWCEYRGQPSMCQAFAADPKSYWNQALQELRRLHHACQGAPVLRPSVCREAGPQAHMQQVTSSLKGSPEPNQQPEAGTPSLRPKATVKLTEATQLGKDSMEELGKAKPTTRPTAKPTQPGPRPGGNEEAKKKAWEHCWKPFQALCAFLISFFRG

SEQ ID NO: 604 - protein, 152 aa, Homo sapiens [sequence omitted]

SEQ ID NO: 605 - protein, 40 aa, Homo sapiens
MSVLSGFLFIVVVCCYCCFVARLQLTKYEFKNCVVIFRDL

SEQ ID NO: 606 - protein, 135 aa, Homo sapiens
MGLWLGMLACVFLATAAFVAYTARLDWKLAAEEAKKHSGRQQQQRAESTATRPGPEKAVLSSVATGSSPGITLTTYSRSECHVDFFRTPEEAHALSAPTSRLSVKQLVIRRGAALGAASATLMVGLTVRILATRH

SEQ ID NO: 607 - protein, 72 aa, Homo sapiens
MATILLKLPILSAMIKKPLRNYLKTSETTMEKIIIQKLVANLKFLPLGTLQLAMMIANLIKKLFFPLVKAAK

SEQ ID NO: 608 - protein, 58 aa, Homo sapiens
MRTFLTFVILKVILIFLSSCASFTRNLLTWPNDVSTEQFETRPFGSELLQTVINVSRT

SEQ ID NO: 609 - protein, 182 aa, Homo sapiens
MWRPSVLLLLLLLRHGAQGKPSPDAGPHGQGRVHQAAPLSDAPHDDAHGNFQYDHEAFLGREVAKEFDQLTPEESQARLGRIVDRMDRAGDGDGWVSLAELRAWIAHTQQRHIRDSVSAAWDTYDTDRDGRVGWEELRNATYGHYAPGEEFHDVEDAETYKKMLARDERRFRVADQDGDSMA

SEQ ID NO: 610 - protein, 950 aa, Homo sapiens
MTWRMGPRFTMLLAMWLVCGSEPHPHATIRGSHGGRKVPLVSPDSSRPARFLRHTGRSRGIERSTLEEPNLQPLQRRRSVPVLRLARPTEPPARSDINGAAVRPEQRPAARGSPREMIRDEGSSARSRMLRFPSGSSSPNILASFAGKNRVWVISAPHASEGYYRLMMSLLKDDVYCELAERHIQQIVLFHQAGEEGGKVRRITSEGQILEQPLDPSLIPKLMSFLKLEKGKFGMVLLKKTLQVEERYPYPVRLEAMYEVIDQGPIRRIEKIRQKGFVQKCKASGVEGQVVAEGNDGGGGAGRPSLGSEKKKEDPRRAQVPPTRESRVKVLRKLAATAPALPQPPSTPRATTLPPAPATTVTRSTSRAVTVAARPMTTTAFPTTQRPWTPSPSHRPPTTTEVITARRPSVSENLYPPSRKDQHRERPQTTRRPSKATSLESFTNAPPTTISEPSTRAAGPGRFRDNRMDRREHGHRDPNVVPGPPKPAKEKPPKKKAQDKILSNEYEEKYDLSRPTASQLEDELQVGNVPLKKAKESKKHEKLEKPEKEKKKKMKNENADKLLKSEKQMKKSEKKSKQEKEKSKKKKGGKTEQDGYQKPTNKHFTQSPKKSVADLLGSFEGKRRLLLITAPKAENNMYVQQRDEYLESFCKMATRKISVITIFGPVNNSTMKIDHFQLDNEKPMRVVDDEDLVDQRLISELRKEYGMTYNDFFMVLTDVDLRVKQYYEVPITMKSVFDLIDTFQSRIKDMEKQKKEGIVCKEDKKQSLENFLSRFRWRRRLLVISAPNDEDWAYSQQLSALSGQACNFGLRHITILKLLGVGEEVGGVLELFPINGSSVVEREDVPAHLVKDIRNYFQVSPEYFSMLLVGKDGNVKSWYPSPMWSMVIVYDLIDSMQLRRQEMAIQQSLGMRCPEDEYAGYGYHSYHQGYQDGYQDDYRHHESYHHGYPY

SEQ ID NO: 611 - protein, 260 aa, Homo sapiens
MLALLGLSQALNILLGLKGLAPAEISAVCEKGNFNVAHGLAWSYYIGYLRLILPELQARIRTYNQHYNNLLRGAVSQRLYILLPLDCGVPDNLSMADPNIRFLDKLPQQTGDRAGIKDRVYSNSIYELLENGQRAGTCVLEYATPLQTLFAMSQYSQAGFSGEDRLEQAKLFCRTLEDILADAPESQNNCRLIAYQEPADDSSFSLSQEVLRHLRQEEKEEVTVGSLKTSAVPSTSTMSQEPELLISGMEKPLPLRTDFS

SEQ ID NO: 612 - protein, 85 aa, Homo sapiens
MGCRGNKLFVLSYCTCLTWLLGTKSQKNPFQVCMSGGWAVSRLETGFQALHDGRASSPLSAACVLDRTVARRWKPPSVPLAHHTK

SEQ ID NO: 613 - protein, 35 aa, Homo sapiens
MPLPSSFPLPVFLSSCPFLMSVSIGFLILVFNVHP

SEQ ID NO: 614 - protein, 55 aa, Homo sapiens
MVNIFGFVSCIVFRCSCSALLHESNHRPYLNKWSLLSTNKTLFRNNRGLDLVLVC

SEQ ID NO: 615 - protein, 78 aa, Homo sapiens
MVCFQSNKPSTSTWRQLSFVFVLFCLFCLGHAFLSLPFYILSIIAMCLEQWAFHNMNSLYHHEWEVRGNLIHVDFTLP

SEQ ID NO: 616 - protein, 41 aa, Homo sapiens [sequence omitted]

SEQ ID NO: 617 - protein, 56 aa, Homo sapiens
  SITE (32): Xaa equals any of the naturally occurring L-amino acids
MLSFFICLLIFVHLLLLSFLISDWPPPTGSAXHKILRLMVVQRLSLLDQRKRWSEA

SEQ ID NO: 618 - protein, 90 aa, Homo sapiens
MAIRLVFLALAGLVDGKPVWITLWMDAKRPNLAGTGSTWGSRRDSHCCHGPTAWSLPCLLCLFRAQQKDRERSLLGVPLPTLQGGNLSDG

SEQ ID NO: 619 - protein, 57 aa, Homo sapiens
MCEGWLHPIFLYCCFWTTTPSCSAFGILDLHQQHPIPTPSSWFSGLCPWTELHHCLR

SEQ ID NO: 620 - protein, 434 aa, Homo sapiens
  SITE (381): Xaa equals any of the naturally occurring L-amino acids
MALTAPSLSLDARQLWDSPETAPAARTPQSPAPCVLLRAQRSLAPEPKEPLIPASPKAEPIWELPTRAPRLSIGDLDFSDLGEDEDQDMLNVESVEAGKDIPAPSPPLPLLSGVPPPPPLPPPPPIKGPFPPPPPLPLAAPLPHSVPDSSALPTKRKTVKLFWRELKLAGGHGVSASRFGPCATLWASLDPVSVDTARLEHLFESRAKEVLPSKKAGEGRRTMTTVLDPKRSNAINIGLTTLPPVHVIKAALLNFDEFAVSKDGIEKLLTMMPTEEERQKIEEAQLANPDIPLGPAENFLMTLASIGGLAARLQLWAFKLDYDSMEREIAEPLFDLKVGMEQLVQNATFRCILATLLAVGNFLNGSQSSGFELSYLEKVSXVKDTVRRQSLLHHLCSLVLQTRPESSDLYSEIPALTRCAKVSTCQNQPRPDKA

SEQ ID NO: 621 - protein, 305 aa, Homo sapiens
MAAGLARLLLLLGLSAGGPAPAGAAKMKVVEEPNAFGVNNPFLPQASRLQAKRDPSPVSGPVHLFRLSGKCFSLVESTYKYEFCPFHNVTQHEQTFRWNAYSGILGIWHEWEIANNTFTGMWMRDGDACRSRSRQSKVELACGKSNRLAHVSEPSTCVYALTFETPLVCHPHALLVYPTLPEALQRQWDQVEQDLADELITPQGHEKLLRTLFEDAGYLKTPEENEPTQLEGGPDSLGFETLENCRKAHKELSKEIKRLKGLLTQHGIPYTRPTETSNLEHLGHETPRAKSPEQLRGDPGLRGSL

SEQ ID NO: 622 - protein, 364 aa, Homo sapiens
  SITE (20): Xaa equals any of the naturally occurring L-amino acids
MPGCPCPGCGMAGPRLLFLXALALELLGRAGGSQPALRSRGTATACRLDNKESESWGALLSGERLDTWICSLLGSLMVGLSGVFPLLVIPLEMGTMLRSEAGAWRLKQLLSFALGGLLGNVFLHLLPEAWAYTCSASPGGEGQSLQQQQQLGLWVIAGILTFLALEKMFLDSKEEGTSQAPNKDPTAAAAALNGGHCLAQPAAEPGLGAVVRSIKVSGYLNLLANTIDNFTHGLAVAASFLVSKKIGLLTTMAILLHEIPHEVGDFAILLRAGFDRWSAAKLQLSTALGGLLGAGFAICTQSPKGVEETAAWVLPFTSGGFLYIALVNVLPDLLEEEDPWRSLQQLLLLCAGIVVMVLFSLFVD

SEQ ID NO: 623 - protein, 282 aa, Homo sapiens
MLALTLAKADSPRTALLCSAWLLTASFSAQQHKGSLQVHQTLSVEMDQVLKALSFPKKKAALLSAAILCFLRTALRQSFSSALVALVPSGAQPLPATKDTVLAPLRMSQVRSLVIGLQNLLVQKDPLLSQACVGCLEALLDYLDARSPDIALHVASQPWNRFLLFTLLDAGENSFLRPEILRLMTLFMRYRSSSVLSHEEVGDVLQGVALADLSTLSNTTLQALHGFFQQLQSMGHLADHSMAQTLQASLEGLPPSTSSGQPPLQDMLCLGGVAVSLSHIRN

SEQ ID NO: 624 - protein, 87 aa, Homo sapiens
  SITE (53): Xaa equals any of the naturally occurring L-amino acids
MTAFCSLLLQAQSLLPRTMAAPQDSLRPGEEDEGMQLLQTKDSMAKGARPGAXRGRARWGLAYTLLHNPTLQVFRKTALLGANGAQP

SEQ ID NO: 625 - protein, 178 aa, Homo sapiens
MLPLLIICLLPAIEGKNCLRCWPELSALIDYDLQILWVTPGPPTELSQSIHSLFLEDNNFLKPWYLDRDHLEEETAKFFTQVHQAIKTLRDDKTVLLEEIYTHKNLFTERLNKISDGLKEKGAPPLSMNAFPAPSPTCTPEPLGSVCLPSTSVSLPSHPPWQPAMSPVPGTGGPPCGL

SEQ ID NO: 626 - protein, 298 aa, Homo sapiens
  SITE (42): Xaa equals any of the naturally occurring L-amino acids
  SITE (58): Xaa equals any of the naturally occurring L-amino acids
MARRSRHRLLLLLLRYLVVALGYHKAYGFSAPKDQQVVTAVXYQEAILACKTPKKTVXSRLEWKKLGRSVSFVYYQQTLQGDFKNRAEMIDFNIRIKNVTRSDAGKYRCEVSAPSEQGQNLEEDTVTLEVLVAPAVPSCEVPSSALSGTVVELRCQDKEGNPAPEYTWFKDGIRLLENPRLGSQSTNSSYTMNTKTGTLQFNTVSKLDTGEYSCEARNSVGYRRCPGKRMQVDDLNISGIIAAVVVVALVISVCGLGVCYAQRKGYFSKETSFQKSNSSSKATTMSENDFKHTKSFII

SEQ ID NO: 627 - protein, 46 aa, Homo sapiens
MEPVALLQPTWWLLNVTLPLVAWSGPLICRPLLHGEGRQGAACLQG

SEQ ID NO: 628 - protein, 65 aa, Homo sapiens
MIKILKEAIEETSFCSFWRISFQLSIHHIFLIFCAQLTTLLYSTFLFIPISWFLIVPGAVDKTIL

SEQ ID NO: 629 - protein, 208 aa, Homo sapiens
MWLFILLSLALISDAMVMDEKVKRSFVLDTASAICNYNAHYKNHPKYWCRGYFRDYCNIIAFSPNSTNHVALRDTGNQLIVTMSCLTKEDTGWYWCGIQRDFARDDMDFTELIVTDDKGTLANDFWSGKDLSGNKTRSCKAPKVVRKADRSRTSILIICILITGLGIISVISHLTKRRRSQRNRRVGNTLKPFSRVLTPKEMAPTEQM

SEQ ID NO: 630 - protein, 44 aa, Homo sapiens
MGWLWLELLGLSIEETLVWAFLNKFLDSSAALLWRILGKSNLST

SEQ ID NO: 631 - protein, 158 aa, Homo sapiens
MALEVLMLLAVLIWTGAENLHVKISCSLDWLMVSVIPVAESRNLYIFADELHLGMGCPANRIHTYVYEFIYLVRDCGIRTRVVSEETLLFQTELYFTPRNIDHDPQEIHLECSTSRKSVWLTPVSTENEIKLDPSPFIADFQTTAEELGLLSSSPNLL

SEQ ID NO: 632 - protein, 101 aa, Homo sapiens
  SITE (67): Xaa equals any of the naturally occurring L-amino acids
MELERCSVVLCILANLAVLRALFLPCIIFHCVSDSRSVNRETKVKFVHTSVHGVGHSFVQSAFKAFXLVPPEAVPEQKDPDPEFPTVKYPNPEEGKGVLVT

SEQ ID NO: 633 - protein, 231 aa, Homo sapiens
MWALQLSLPTCGLAALLTHMRPCSSPYPHAGLAALLTHMGPCRSPYPHGGLAAVLTHMRALQLSLPTWGLAALLTHMRPCSSPYPHAGLACCWLWSLSSHRSLQVQATHRLVVRTIKDRVMLKVLPQTRRRGPFLSSCRNDVMRNCVPRHAVLVTTCVFVSFPTHCKVGITGPITQVKQKPGNHSSPCPVIQLVAKAEFELMLPSVPKPVYLTLVLSCWCLCDVPCLSVSL

SEQ ID NO: 634 - protein, 71 aa, Homo sapiens
MVQGPLTHLMLVLLISLIFLSRGSGRAWAFSHSCFKTSDLLPCRNRWEVIEFLHYSNLHSHISLSVTKTFL

SEQ ID NO: 635 - protein, 230 aa, Homo sapiens
MASLGLQLVGYILGLLGLLGTLVAMLLPSWKTSSYVGASIVTAVGFSKGLWMECATHSTGITQCDIYSTLLGLPADIQAAQAMMVTSSAISSLACIISVVGMRCTVFCQESRAKDRVAVAGGVFFILGGLLGFIPVAWNLHGILRDFYSPLVPDSMKFEIGEALYLGIISSLFSLIAGIILCFSCSSQRNRSNYYDAYQAQPLATRSSPRPGQPPKVKSEFNSYSLTGYV

SEQ ID NO: 636 - protein, 37 aa, Homo sapiens
MCYIPGSTGGQCWPWCWCWLCREALEWLCGAVSAGPA

SEQ ID NO: 637 - protein, 133 aa, Homo sapiens
MRVPLVLSWAFVLVGFSGVYLASESFWFPPSLCDLTSPPGLHLWKFIRDLVSMEELTDSAREMGYWMMVFSLKAMFPVSSGCFQERQETNKSLTLLRCSQRDTSPLMDGQTWARVRVTKPPTTATAAYNRHIR

SEQ ID NO: 638 - protein, 42 aa, Homo sapiens
MFLFITFTILAIFIIEPRNLRVDLNLIKFQTSWPKTLVEEQN

SEQ ID NO: 639 - protein, 44 aa, Homo sapiens
MVLKQKQYLFTVGILFILFFSPVNAVKRFIPLRPGSSQAYMLLG

SEQ ID NO: 640 - protein, 111 aa, Homo sapiens
MQFSLCLTAVFLLQLAAGILGFVFSDKARGKVSEIINNAIVHYRDDLDLQNLIDFGQKKVWVSQWSGGLWVKVNVIPRDASPSMPVGLFITCQVMASGKGFGKKSTRSRVL

SEQ ID NO: 641 - protein, 56 aa, Homo sapiens
MFLKVLVFLIFFSPFSSSLFSGEAVRGRGAGLGLGIGRGWTSCLSVLNGCDGARSH

SEQ ID NO: 642 - protein, 78 aa, Homo sapiens
MSPHQPMQVSSSKTILWLVLSCLCPSSPHPVISGLPQWYIGVLAGIVPVAPIRPGDSGLDLQREGPQPILSQGLNRRT

SEQ ID NO: 643 - protein, 52 aa, Homo sapiens
MGPCRASRCLSLLVLFPPGVAGRPAPGRLHPVPTGPLPRMYSAGARGRHGAH

SEQ ID NO: 644 - protein, 50 aa, Homo sapiens
MDGGPGAFSRAWVLQIPWLLLSGGNFALCEPRPCPSAGHPWQEAGLPSSP

SEQ ID NO: 645 - protein, 45 aa, Homo sapiens
MLVSLIICLLLDLLNQPSLLRDLILKQHTGNPHLSFPLKYSHWMG

SEQ ID NO: 646 - protein, 168 aa, Homo sapiens
MVTFITATLWIAVFSYIMVWLVTIIGYTLGIPDVIMGITFLAAGQVSRLHGQPNCGETRPWGHGSLQHHRSNVFDILVGLGVPWGLQTMVVNYGSTVKINSRGLVYSVVLLLGSVALTVLGIHLNKWRLDRKLGVYVLVLYAIFLCFSIMIEFNVFTFVNLPMCREDD

SEQ ID NO: 647 - protein, 43 aa, Homo sapiens [sequence omitted]

SEQ ID NO: 648 - protein, 105 aa, Homo sapiens
MSGLAAAAHVFRVCLFPLSWGSSKTTFIHGLSSYIATPVLNSIFSSWKSRRKDTWTCLLHRLSAFPISRRRRNFALFSHSCVCIRSSSDDVGPTMYSFSVPCRVK

SEQ ID NO: 649 - protein, 1887 aa, Homo sapiens
MAARGRGLLLLTLSVLLAAGPSAAAAKLNIPKVLLPFTRATRVNFTLEASEGCYRWLSTRPEVASIEPLGLDEQQCSQKAVVQARLTQPARLTSIIFAEDITTGQVLRCDAIVDLIHDIQIVSTTRELYLEDSPLELKIQALDSEGNTFSTLAGLVFEWTIVKDSEADRFSDSHNALRILTFLESTYIPPSYISEMEKAAKQGDTILVSGMKTGSSKLKARIQEAVYKNVRPAEVRLLILENILLNPAYDVYLMVGTSIHYKVQKIRQGKITELSMPSDQYELQLQNSIPGPEGDPTRPVAVLAQDTSMVTALQLGQSSLVLGHRSIRMQGASRLPNSTIYVVEPGYLGFTVHPGDRWVLETGRLYEITIEVFDKFSNKVYVSDNIRIETVLPAEFFEVLSSSQNGSYHRIRALKRGQTAIDAALTSVVDQDGGVHILQVPVWNQQEVEIHIPITLYPSILTFPWQPKTGAYQYTIRAHGGSGNFSWSSSSHLVATVTVKGVMTTGSDIGFSVIQAHDVQNPLHFGEMKVYVIEPHSMEFAPCQVEARVGQALELPLRISGLMPGGASEVVTLSDCSHFDLAVEVENQGVFQPLPGRLPPGSEHCSGVRVKAEAQGSTTLLVSYRHGHVHLSAKITIAAYLPLKAVDPSSVALVTLGSSKEMLFEGGPRPWILEPSKFFQNVTAEDTDSIGLALFAPHSSRNYQQHWILVTCQALGEQVIALSVGNKPSLTNPFPAVEPAVVKFVCAPPSRLTLVPVYTSPQLDMSCPLLQQNKQVVPVSSHRNPLLDLAAYDQEGRRFDNFSSLSIQWESTRPVLASIEPELPMQLVSQDDESGQKKLHGLQAILVHEASGTTAITATATGYQESHLSSARTKQPHDPLVPLSASIELILVEDVRVSPEEVTIYNHPGIQAELRIREGSGYFFLNTSTADVVKVAYQEARGVAMVHPLLPGSSTIMIHDLCLVFPAPAKAVVYVSDIQELYIRVVDKVEIGKTVKAYVRVLDLHKKPFLAKYFPFMDLKLRAASPIITLVALDEALDNYTITFLIRGVAIGQTSLTASVTNKAGQRINSAPQQIEVFPPFRLMPRKVTLLIGATMQVTSEGGPQPQSNILFSISNESVALVSAAGLVQGLAIGNGTVSGLVQAVDAETGKVVIISQDLVQVEVLLLRAVRIRAPIMRMRTGTQMPIYVTGITNHQNPFSFGNAVPGLTFHWSVTKRDVLDLRGRHHEASIRLPSQYNFAMNVLGRVKGRTGLRVVVKAVDPTSGQLYGLARELSDEIQVQVFEKLQLLNPEIEAEQILMSPNSYIKLQTNRDGAASLSYRVLDGPEKVPVVHVDEKGFLASGSMIGTSTIGVIAQEPFGANQTIIVAVKVSPVSYLRVSMSPVLHTQNKEALVAVPLGMTVTFTVHFHDNSGDVFHAHSSVLNFATNRDDFVQIGKGPTNNTCVVRTVSVGLTLLRVWDAEHPGLSDFMPLPVLQAISPELSGAMVVGDVLCLATVLTSLEGLSGTWSSSANSILHIDPKTGVAVARAVGSVTVYYEVAGHLRTYKEVVVSVPQRIMARHLHPIQTSFQEATASKVIVAVGDRSSNLRGECTPTQREVIQALHPETLISCQSQFKPAVFDFPSQDVFTVEPQFDTALGQYFCSITMHRLTDKQRKHLSMKKTALVVSASLSSSHFSTEQVGAEVPFSPGLFADQAEILLSNHYTSSEIRVFGAPEVLENLEVKSGSPAVLAFAKEKSFGWPSFITYTVGVLDPAAGSQGPLSTTLTFSSPVTNQAIAIPVTVAFVVDRRGPGPYGASLFQHFLDSYQVMFFTLFALLAGTAVMIIAYHTVCTPRDLAVPAALTPRASPGHSPHYFAASSPTSPNALPPARKASPPSGLWSPAYASH

SEQ ID NO: 650 - protein, 52 aa, Homo sapiens
MKCFFLFVVILIIMKSNLSDIIIATYTYCIPDYFFHTFIFNLSVYLNSKFIS

SEQ ID NO: 651 - protein, 346 aa, Homo sapiens [sequence omitted]

SEQ ID NO: 652 - protein, 155 aa, Homo sapiens [sequence omitted]

SEQ ID NO: 653 - protein, 30 aa, Homo sapiens
MALSVLVLLLLAVLYEGIKVGKASCSTRYW

SEQ ID NO: 654 - protein, 363 aa, Homo sapiens
MKTLLLLVGLLLTWENGRVLGDQMVSDTELQEMSTEGSKYINREIKNALKGVKQIKTLIEQTNEERKSLLTNLEEAKKKKEDALNDTKDSEMKLKASQGVCNDTMMALWEECKPCLKQTCMKFYARVCRSSTGLVGHQVEEFLNQSSPFYFWINGDRIDSLLENDRQQTHALDVMQDSFDRASSIMDELFQDRFFTREAQDPFHFSPFSSFQRRPFFFNIKHRFARNIMPFPGYQPLNFHDMFQPFFDMIHQAQQAMDVNLHRLPHFPMEFTEEDNQDGAVCKEIRHNSTGCLKMKDQCEKCREILSVDCSSNNPAQVQLRQELNNSLQIAEKFTKLVRRAAAVLPGEDVQHVLPAEAAGRAV

SEQ ID NO: 655 - protein, 122 aa, Homo sapiens
MYRAIDSFPRWRSYFYFITLIFFLAWLVKNVFIAVIIETFAEIRVQFQQMWGSRSSTTSTATTQMFHEDAAGGWQLVAVDVNKPQGRAPACLQVQYNDIFKNRPAKVFEFYFIQENPQLFKL

SEQ ID NO: 656 - protein, 51 aa, Homo sapiens
MIKHVAWLIFTNCIFFCPVAFFSFAPLITAISISPEIMKSVTLIFFPCLLA

SEQ ID NO: 657 - protein, 72 aa, Homo sapiens
MGSAALEILGLVLCLVGWGGLILACGLPMWQVTAFLDHNIVTAQTTWKGLWMSCVVQSTGTCSAKCTTRCWL

SEQ ID NO: 658 - protein, 118 aa, Homo sapiens
MCYLLLLLIQTAELLIHPQGLQAVSNGESALKGTRPTFSSPFILVTEGRKEWEGVFLSSGWKGNTLSNYYISLVFYYSRILQPYFYCLWGKLEMVTLIRSVWRGINGGDKISVGFGKC

SEQ ID NO: 659 - protein, 169 aa, Homo sapiens
MWAVLRLALRPCARASPAGPRAYHGDSVASLGTQPDLGSALYQENYKQMKALVNQLHERVEHIKLGGGEKARALHISRGKLLPRERIDNLIDPGSPFLELSQFAGYQLYDNEEVPGGGIITGIGRVSGVECMIIANDATVKGGAYYPVTVKKQLRAQEIAMQTGSPAST

SEQ ID NO: 660 - protein, 47 aa, Homo sapiens
MTAGFMGMAVAIILFGWIIGVLGCCWDRGLMQYVAGCSSSWEGKQWN

SEQ ID NO: 661 - protein, 203 aa, Homo sapiens
MQLGSVLLTRCPFWGCFSQLMLYAERAEARRKPDIPVPYLYFDMGAAVLCASFMSFGVKRRWFALGAALQLAISTYAAYIGGYVHYGDWLKVRMYSRTVAIIGGFLVLASGAGELYRRKPRSRSLQSTGQVFLGIYLICVAYSLQHSKEDRLAYLNHLPGGELMIQLFFVLYGILAPGLSVRLLRDPRCPDPGCTAAPCHAAH

SEQ ID NO: 662 - protein, 123 aa, Homo sapiens
MHDGSKPFPRYGYKPSPPNGCGSPLFGVHLNIGIPSLTKCCNQHDRCYETCGKSKNDCDEEFQYCLSKICRDVQKTLGLTQHVQACETTVELLFDSVIHLGCKPYLDSQRAACRCHYEEKTDL

SEQ ID NO: 663 - protein, 23 aa, Homo sapiens
LGSLSTAPSSALPTLGARRTRSK

SEQ ID NO: 664 - protein, 60 aa, Homo sapiens
MGNCQAGHNLHLCLAHHPPLVCATLILLLLGLSGLGLGSFLLTHRTGLRTLTSPRTGSLF

SEQ ID NO: 665 - protein, 178 aa, Homo sapiens [sequence omitted]

SEQ ID NO: 666 - protein, 219 aa, Homo sapiens
  SITE (41): Xaa equals any of the naturally occurring L-amino acids
AAATAASLSPRGCRLRTPSSDVSPSRAPPPSAAPLPTGRAXMSPSGRLCLLTIVGLILPTRGQTLKDTTSSSSADSTIMDIQVPTRAPDAVYTELQPTSPTPTWPADETPQPQTQTQQLEGTDGPLVTDPETHKSTKAAHPTDDTTTLSERPSPSTDVQTDPQTLKPSGFHEDDPFFYDEHTLRKRGLLVAAVLFITGIIILTSGKCRQLSRLCRNHCR

SEQ ID NO: 667 - protein, 173 aa, Homo sapiens
MEAPGPRALRTALCGGCCCLLLCAQLAVAGKGARGFGRGALIRLNIWPAVQGACKQLEVCEHCVEGDRARNLSSCMWEQCRPEEPGHCVAQSEVVKEGCSIYNRSEACPAAHHHPTYEPKTVTTGSPPVPEAHSPGFDGASFIGGVVLVLSLQAVAFFVLHFLKAKDSTYQTL

SEQ ID NO: 668 - protein, 210 aa, Homo sapiens
  SITE (139): Xaa equals any of the naturally occurring L-amino acids
  SITE (187): Xaa equals any of the naturally occurring L-amino acids
MEAPGPRALRTALCGGCCCLLLCAQLAVAGKGARGFGRGALIRLNIWPAVQGACKQLEVCEHCVEGDRARNLSSCMWEQCRPEEPGHCVAQSEVVKEGCSIYNRSEACPAAHHHPTYEPKTVTTGSPPVPEAHSPGFDXASFIGGVVLVLSLQAVAFFVLTSSRPRTAPTRRCEYLASSKYLSPSSXLVPAHVPFSTQGAVFSTGKPSGR

SEQ ID NO: 669 - protein, 105 aa, Homo sapiens
  SITE (70): Xaa equals any of the naturally occurring L-amino acids
MISYIVLLSILLWPLVVYHELIQRMYTRLEPLLMQLDYSMKAEANALHHKHDKRKRQGKNAPPGGDEPLXETESESEAELAGFSPVVDVKKTALALAIYRLRAVR

SEQ ID NO: 670 - protein, 89 aa, Homo sapiens
  SITE (24): Xaa equals any of the naturally occurring L-amino acids
  SITE (75): Xaa equals any of the naturally occurring L-amino acids
MFKDYPPAIKPSYDVLLLLLLLVXLLQAGLNTGTAIQCVRFKVSARLQGASWDTQNGPQERLAGEVARSPLKEFXKEKAWRAVVVQMAQ

SEQ ID NO: 671 - protein, 127 aa, Homo sapiens [sequence omitted]

SEQ ID NO: 672 - protein, 9 aa, Homo sapiens
LGKPWRYPT

SEQ ID NO: 673 - protein, 2 aa, Homo sapiens
LQ

SEQ ID NO: 674 - protein, 146 aa, Homo sapiens; identical to SEQ ID NO: 449

SEQ ID NO: 675 - protein, 941 aa, Homo sapiens
  SITE (807): Xaa equals any of the naturally occurring L-amino acids
  SITE (809): Xaa equals any of the naturally occurring L-amino acids
  SITE (815): Xaa equals any of the naturally occurring L-amino acids
  SITE (819): Xaa equals any of the naturally occurring L-amino acids
MVFLPLKWSLATMSFLLSSLLALLTVSTPSWCQSTEASPKRSDGTPFPWNKIRLPEYVIPVHYDLLIHANLTTLTFWGTTKVEITASQPTSTIILHSHHLQISRATLRKGAGERLSEEPLQVLEHPPQEQIALLAPEPLLVGLPYTVVIHYAGNLSETFHGFYKSTYRTKEGELRILASTQFEPTAARMAFPCFDEPAFKASFSIKIRREPRHLAISNMPLVKSVTVAEGLIEDHFDVTVKMSTYLVAFIISDFESVSKITKSGVKVSVYAVPDKMNQADYALDAAVTLLEFYEDYFSIPYPLPKQDLAAIPDFQSGAMENWGLTTYRESALLFDAEKSSASSKLGITMTVAHELAHQWFGNLVTMEWWNDLWLNEGFAKFMEFVSVSVTHPELKVGDYFFGKCFDAMEVDALNSSHPVSTPVENPAQIREMFDDVSYDKGACILNMLREYLSADAFKSGIVQYLQKHSYKNTKNEDLWDSMASICPTDGVKGMDGFCSRSQHSSSSSHWHQEGVDVKTMMNTWTLQRGFPLITITVRGRNVHMKQEHYMKGSDGAPDTGYLWHVPLTFITSKSDMVHRFLLKTKTDVLILPEEVEWIKFNVGMNGYYIVHYEDDGWDSLTGLLKGTHTAVSSNDRASLINNAFQLVSIGKLSIEKALDLSLYLKHETEIMPVFQGLNELIPMYKLMEKRDMNEVETQFKAFLIRLLRDLIDKQTWTDEGSVSERMLRSELLLLACVHNYQPCVQRAEGYFRKWKESNGNLSLPVDVTLAVFAVGAQSTEGWDFLYSKYQFSLSSTEKSQIEFALCXPXNKEKLXWLLXESFKGDKIKTQEFPQILTLIGRNPVGYPLAWQFLRKNWNKLVQKFELGSSSIAHMVMGTTNQFSTRTRLEEVKGFFSSLKENGSQLRCVQQTIETIEENIGWMDKNFDKIRVWLQSEKLERM

SEQ ID NO: 676 - protein, 271 aa, Homo sapiens
MTQGKLSVANKAPGTEGQQQVHGEKKEAPAVPSAPPSYEEATSGEGMKAGAFPPAPTAVPLHPSWAYVDPSSSSSYDNGFPTGDHELFTTFSWDDQKVRRVFVRKVYTILLIQLLVTLAVVALFTFCDPVKDYVQANPGWYWASYAVFFATYLTLACCSGPRRHFPWEPDSPDRLYPVHGLPHWDAVQLLQHHLRAAVPGHHGPCLPLSHRLQLPDQVRLHLLPGRALRASHDSFLQRTHPGHPPTLPICALAPCSLCSTGSGCIYIVPGT

SEQ ID NO: 677 - protein, 138 aa, Homo sapiens
MAYLTGMLSSYYNTTSVLLCLGITALVCLSVTVFSFQTKFDFTSCQGVLFVLLMTLFFSGLILAILLPFQYVPWLHAVYAALGAGVFTLFLALDTQLLMGNRRHSLSPEEYIFGALNIYLDIIYIFTFFLQLFGTNRE

SEQ ID NO: 678 - protein, 157 aa, Homo sapiens
MVKSVIFLSFWQGMLLAILEKCGAIPKIHSARVSVGEGTVAAGYHDFIICVEMFFAALALRHPFTYNVYADKRLDAQGRCAPMKSISSSLKETMNPHDIVQDAIHNFSPAYQQYTQQSTLEPGPTWRGGAHGLSRSHSLSGARDNEKTLLLSSDDEF

SEQ ID NO: 679 - protein, 118 aa, Homo sapiens
FLSSWQRPACGCQRPALPLHLGGAEQLGPSCPGGWVQTQAEDQPWPCPAICFHQAVSPPWLPFSLQAKVLLIPTPLVFACPALLFAWRVGGAQWQGISGPWGRGDGNMCPTAPSPPPP

SEQ ID NO: 680 - protein, 59 aa, Homo sapiens
MMKDVFFFLFLLAVWVVSFGVAKQAILIHNERRVDWLFRGPSTTPTSPSSGRSRATSTV

SEQ ID NO: 681 - protein, 46 aa, Homo sapiens; identical to SEQ ID NO: 460

SEQ ID NO: 682 - protein, 64 aa, Homo sapiens
  SITE (7): Xaa equals any of the naturally occurring L-amino acids
  SITE (27): Xaa equals any of the naturally occurring L-amino acids
SWVIVVXIWGYLLEGHGVPFCKSYGPXPWKLHTHHAAYNSGSSQVYRILGNSPCPVLIHCSFSG

SEQ ID NO: 683 - protein, 14 aa, Homo sapiens
  SITE (9): Xaa equals any of the naturally occurring L-amino acids
  SITE (14): Xaa equals any of the naturally occurring L-amino acids
WKGLLEGSXEATMX

SEQ ID NO: 684 - protein, 107 aa, Homo sapiens
  SITE (66): Xaa equals any of the naturally occurring L-amino acids
PLGREPLAGFLSFLSFSLLWCLEAFPRLQFLTTLTDFAIVLSPPLSFPKLTLWRLIKRKNHRPGAXLTPRRRANHLRCGVRDQPDQNRETPSLLNNTKLAGRGGARL

SEQ ID NO: 685 - protein, 127 aa, Homo sapiens
MPRAPWRIPLCALPTLCLGSPLPSQPTHPIFYDHRAPTWKMAHPGGPRSSHSPRGPGGHPALRQRLPCRRGEPETALCSSAPGAGFAEPPCKASPGWGPPSRGPQGDRSQGEWLPALGTPCGGPDDS

SEQ ID NO: 686 - protein, 90 aa, Homo sapiens
  SITE (31): Xaa equals any of the naturally occurring L-amino acids
  SITE (57): Xaa equals any of the naturally occurring L-amino acids
MPRAPWRIPLCALPTLCLGSPLPSQPTHPIXYDHRAPTWKMAHPGGPRSSHSPRTWXTPSSQTKAALPAGGARNSPLQLCTRSRFCGTPM

SEQ ID NO: 687 - protein, 308 aa, Homo sapiens
  SITE (87): Xaa equals any of the naturally occurring L-amino acids
  SITE (185): Xaa equals any of the naturally occurring L-amino acids
MPVPWFLLSLALGRSPVVLSLERLVGPQDATHCSPGLSCRLWDSDILCLPGDIVPAPGPVLAPTHLQTELVLRCQKETDCDLCLRVXVHLAVHGHWEEPEDEEKFGGAADLGVEEPRNASLQAQVVLSFQAYPTARCVLLEVQVPAALVQFGQSVGSVVYDCFEAALGSEVRIWSYTQPRYEKEXNHTQQLPDCRGLEVWNSIPSCWALPWLNVSADGDNVHLVLNVSEEQHFGLSLYWNQVQGPPKPRWHKNLTGPQIITLNHTDLVPCLCIQVWPLEPDSVRRTSAPSGRTPAHTRTSGKPPDCDC

SEQ ID NO: 688 - protein, 55 aa, Homo sapiens
MSSDFLCFFFKLCNQMILCFFFRGAEYWFLLLVVFSFLCHSCFFFVFSVSNTICI

SEQ ID NO: 689 - protein, 44 aa, Homo sapiens [sequence omitted]

SEQ ID NO: 690 - protein, 98 aa, Homo sapiens; identical to SEQ ID NO: 468

SEQ ID NO: 691 - protein, 22 aa, Homo sapiens
LPRPCAPSPVWRQVGREEASLL

SEQ ID NO: 692 - protein, 25 aa, Homo sapiens
  SITE (9): Xaa equals any of the naturally occurring L-amino acids
CAVRFREQXAPERVFLPTRGRKSEP

SEQ ID NO: 693 - protein, 108 aa, Homo sapiens
  SITE (48): Xaa equals any of the naturally occurring L-amino acids
  SITE (55): Xaa equals any of the naturally occurring L-amino acids
  SITE (58): Xaa equals any of the naturally occurring L-amino acids
  SITE (67): Xaa equals any of the naturally occurring L-amino acids
MFYKLTLILCELSVAGVTQAASQRPLQRLPRHICSQRNPPGRCLLKAXLQTTWGXPDXQFPGCPHPXRVTLNARQMGNGKEKKAADLKLKFPQKRFYLSAFSERIKAF

SEQ ID NO: 694 - protein, 73 aa, Homo sapiens
  SITE (38): Xaa equals any of the naturally occurring L-amino acids
  SITE (48): Xaa equals any of the naturally occurring L-amino acids
  SITE (54): Xaa equals any of the naturally occurring L-amino acids
  SITE (55): Xaa equals any of the naturally occurring L-amino acids
  SITE (68): Xaa equals any of the naturally occurring L-amino acids
MFYKLTLILCELSVAGVTQAASQRPLQRLPRHICSQRXPPGRCLLKAXLQTTWXXPDKPIPRLSPPLXSDPKR

SEQ ID NO: 695 - protein, 81 aa, Homo sapiens
MSKRSASFILLPLLFLKGSFAKLNARISDCLEERYCHNLWMVFQGCVITELHLSRMSKTLSSLCYDFVINVYIFFKFLDIT

SEQ ID NO: 696 - protein, 313 aa, Homo sapiens
MAQLEGYYFSAALSCTFLVSCLLFSAFSRALREPYMDEIFHLPQAQRYCEGHFSLSQWDPMITTLPGLYLVSIGVIKPAIWIFGWSEHVVCSIGMLRFVNLLFSVGNFYLLYLLFCKVQPRNKAASSIQRVLSTLTLAVFPTLYFFNFLYYTEAGSMFFTLFAYLMCLYGNHKTSAFLGFCGFMFRQTNIIWAVFCAGNVIAQKLTEAWKTELQKKEDRLPPIKGPFAEFRKILQFLLAYSMSFKNLSMLLLLTWPYILLGFLFCAFVVVNGGIVIGDRSSHEACLHFPQLFYFFSFTLFFSFPHLLSQQINK

SEQ ID NO: 697 - protein, 134 aa, Homo sapiens
  SITE (8): Xaa equals any of the naturally occurring L-amino acids
  SITE (73): Xaa equals any of the naturally occurring L-amino acids
  SITE (76): Xaa equals any of the naturally occurring L-amino acids
MAQLEGYXFSAALSCTFLVSCLLFSAFSRALREPYMDEIFHLPQAQRYCEGHFSLSQWDPMITTLPGLYLVSXGVXKPAIWIFGWSEHVVCSIGMLRFVNLLFSVGNFYLLYLLFCKYNPETRLPQVSRESCQH

SEQ ID NO: 698 - protein, 122 aa, Homo sapiens
  SITE (89): Xaa equals any of the naturally occurring L-amino acids
  SITE (91): Xaa equals any of the naturally occurring L-amino acids
  SITE (94): Xaa equals any of the naturally occurring L-amino acids
  SITE (97): Xaa equals any of the naturally occurring L-amino acids
  SITE (98): Xaa equals any of the naturally occurring L-amino acids
MHRSEPFLKMSLLILLFLGLAEACTPREVNLLKGIIGLMSRLSPDEILGLLSLQVLHEETSGCKEEVKPFSGTTPSRKPLPKREEHVEXPXNAXTWXXTYLFVSYNKGDWFTFSSQVLLPLL

SEQ ID NO: 699 - protein, 43 aa, Homo sapiens; identical to SEQ ID NO: 487

SEQ ID NO: 700 - protein, 2 aa, Homo sapiens
LH

SEQ ID NO: 701 - protein, 166 aa, Homo sapiens [sequence omitted]

SEQ ID NO: 702 - protein, 26 aa, Homo sapiens
GLFLGQMNWIFSCCFSNNVTTTVKKR

SEQ ID NO: 703 - protein, 20 aa, Homo sapiens
RLLNLSVPMFTFIVVKRYAT

SEQ ID NO: 704 - protein, 11 aa, Homo sapiens
MSGGLSFLLLV

SEQ ID NO: 705 - protein, 108 aa, Homo sapiens; identical to SEQ ID NO: 509

SEQ ID NO: 706 - protein, 130 aa, Homo sapiens
STCCGWGPLGHSRVRGCHCHLGHVGRHQHFVVTNSTVTNIFGQIPFYTSRQLLVCNPTGQREGPVTWLSHCPAPQMVLGLLFSLGPANTTVFTSAHWLSAVVPGSQWHVSPRSSLIPQHTPKGSVANTLN

SEQ ID NO: 707 - protein, 122 aa, Homo sapiens
  SITE (19): Xaa equals any of the naturally occurring L-amino acids
  SITE (73): Xaa equals any of the naturally occurring L-amino acids
KAPSSHPGLTCVSLSRLQXSLSLCFPSGPCWAGLLSSLALAGGAPGALPPWQPGQDSKMRTAELVGGSHGPAXGPGEAEPEPTAVVLWTVDPEGGLGQVPAEGPGGLCVPLGPGALVTWTPG

SEQ ID NO: 708 - protein, 243 aa, Homo sapiens; identical to SEQ ID NO: 513

SEQ ID NO: 709 - protein, 154 aa, Homo sapiens
  SITE (150): Xaa equals any of the naturally occurring L-amino acids
MARHGLPLLPLLSLLVGAWLKLGNGQATSMVQLQGGRFLMGTNSPDSRDGEGPVREATVKPFAIDIFPVTNKDFRDFVREKKYRTEAEMFGWSFVFEDFVSDELRNKATQPMKSVLWWLPVEKAFWRQPAGPGSGIRERLEHPVLHVSWXDARA

SEQ ID NO: 710 - protein, 57 aa, Homo sapiens
MPCTCTWRNWRQWIRPLVAVIYLVSIVVAVPLCVWELQKLEVGIHTKAWFIAGIFLL

SEQ ID NO: 711 - protein, 107 aa, Homo sapiens
  SITE (92): Xaa equals any of the naturally occurring L-amino acids
MVRYTYSMLSVIGISYAVLTWLSQTLWMPIYPLCVLAEAFAIYQSLPYFESFGTYSTKLPFDLSIYFPYVLKIYLMMLFIGMYFTYSHLYSXRRDILGIFPIKKKKM

SEQ ID NO: 712 - protein, 37 aa, Homo sapiens
MVRYTYSMLSVIGISYAVLTWAQSNTMDANLSFVCSC

SEQ ID NO: 713 - protein, 46 aa, Homo sapiens
MKSQCYSPSYFAFFCLVFFQITSASSQTLRGHVLCRTTLRDSSAYC

SEQ ID NO: 714 - protein, 442 aa, Homo sapiens
  SITE (364): Xaa equals any of the naturally occurring L-amino acids
MWFTYLLLYLHSVRAYSSRGAGCCCCWARWRRAVHTARGLRGRPRRQLLRPLRPAQGLAPGRHRLRPAVLPLHLQPLPGLWGGHAEWAALLYYGPFIVIFQFGWASTQISHLSLIPELVTNDHEKVELTALRYAFTVVANITVYGAAWLLLHLQGSSRVEPTQDISISDQLGGQDVPVFRNLSLLVVGVGAVFSLLFHLGTRERRRPHAEEPGEHTPLLAPATAQPLLLWKHWLREPAFYQVGILYMTTRLIVNLSQTYMAMYLTYSLHLPKKFIATIPLVMYLSGFLSSFLMKPINKCIGRNMTYFSGLLVILAFAAWVALAEGLGVAVYAAAVLLGAGCATILVTSLAMTADLIGPHTNSGXFVYGSMSFLDKVANGLAVMAIQSLHPCPSELCCRACVSFYHWAMVAVTGGVGVAAALCLCSLLLWPTRLRRWDRDARP

SEQ ID NO: 715 - protein, 309 aa, Homo sapiens
  SITE (26): Xaa equals any of the naturally occurring L-amino acids
  SITE (84): Xaa equals any of the naturally occurring L-amino acids
  SITE (111): Xaa equals any of the naturally occurring L-amino acids
AADNYGIPRACRNSARSYGAAWLLLXPAGSSRVEPTQDISISDQLGGQDVPVFRNLSLLVVGVGAVFSLLFHLGTRERRRPHAXEPGEHTPLLAPATAQPLLLWKHWLREXAFYQVGILYMTTRLIVNLSQTYMAMYLTYSLHLPKKFIATIPLVMYLSGFLSSFLMKPINKCIGRNMTYFSGLLVILAFAAWVALAEGLGVAVYAAAVLLGAGCATILVTSLAMTADLIGPHTNSGAFVYGSMSFLDKVANGLAVMAIQSLHPCPSELCCRACVSFYHWAMVAVTGGVGVAAALCLCSLLLWPTRLRR

SEQ ID NO: 716 - protein, 243 aa, Homo sapiens
  SITE (26): Xaa equals any of the naturally occurring L-amino acids
  SITE (84): Xaa equals any of the naturally occurring L-amino acids
  SITE (111): Xaa equals any of the naturally occurring L-amino acids
AADNYGIPRACRNSARSYGAAWLLLXPAGSSRVEPTQDISISDQLGGQDVPVFRNLSLLVVGVGAVFSLLFHLGTRERRRPHAXEPGEHTPLLAPATAQPLLLWKHWLREXAFYQVGILYMTTRLIVNLSQTYMAMYLTYSLHLPKKFIATIPLVMYLSGFLSSFLMKPINKCIGRNMTYFSGLLVILAFAAWVALAEGLGVAVYAAAVLLGAGCATILVTSLAMTADLIGPHTNSGLSCTAP

SEQ ID NO: 717 - protein, 148 aa, Homo sapiens
MAGSPLLWGPRAGGVGLLVLLLLGLFRPPPALCARPVKEPRGLSAASPPLARLALLAASGGQCPEVRRRGRCRPGAGAGASAGAERQERARAEAQRLRISRRASWRSCCASGAPPATLIRLWAWTTTPTRLQRSSLALCSAPALTLPP

SEQ ID NO: 718 - protein, 92 aa, Homo sapiens
  SITE (61): Xaa equals any of the naturally occurring L-amino acids
  SITE (68): Xaa equals any of the naturally occurring L-amino acids
MGSTWGSPGWVRLALCLTGLVLSLYALHVKAARARDRDYRALCDVGTAISCSRVFSSRLPXDTLGLCXDAAELPGVSRWFCLPGLDPVLRAL

SEQ ID NO: 719 - protein, 190 aa, Homo sapiens
  SITE (25): Xaa equals any of the naturally occurring L-amino acids
MPVPTLCLLWALAMVTRPASAAPMXGPELAQHEELTLLFHGTLQLGQALNGVYRTTEGRLTKARNSLGLYGRTIELLGQEVSRGRDAAQELRASLLETQMEEDILQLQAEATAEVLGEVAQAQKVLRDSVQRLEVQLRSAWLGPAYREFEVLKAHADKQEPTSYGPHRPRQRQRREMVAQQHRLRQIQER

SEQ ID NO: 720 - protein, 65 aa, Homo sapiens
  SITE (24): Xaa equals any of the naturally occurring L-amino acids
MCKGLKNPEGLLLLLLLLLFTDTXNSHCLPPYLSCFLHERQPELQSVCISAAYVLAPLQNPVSSL

SEQ ID NO: 721 - protein, 299 aa, Homo sapiens
  SITE (172): Xaa equals any of the naturally occurring L-amino acids
  SITE (174): Xaa equals any of the naturally occurring L-amino acids
GGEEEGEEGAEISGLGAGRRSAPIAVGLGFLGVGGRGGSDMEANGSQGTSGSANDSQHDPGKMFIGGLSWQTSPDSLRDYFSKFGEIRECMVMRDPTTKRSRGFGFVTFADPASVDKVLGQPHHELDSKTIDPKVAFPRRAQPKMVTRTKKIFVGGLSANTVVEDVKQYFEXFXKVEDAMLMFDKTTNRHRGFGFVTFENEDVVEKVCEIHFHEINNKMVECKKAQPKEVMFPPGTRGRARGLPYTMDAFMLGMGMLGESGQDRRSPWTGRAMEASTPNWVTYQWGKLLHLSKPQFPCL

SEQ ID NO: 722 - protein, 54 aa, Homo sapiens
MSVWPRSTLLFCLLSLSTGLFLDKLGIIIPILLCGWKLNVIMMCVRCLHSAWRY

SEQ ID NO: 723 - protein, 306 aa, Homo sapiens
  SITE (171): Xaa equals any of the naturally occurring L-amino acids
  SITE (180): Xaa equals any of the naturally occurring L-amino acids
  SITE (182): Xaa equals any of the naturally occurring L-amino acids
  SITE (188): Xaa equals any of the naturally occurring L-amino acids
  SITE (208): Xaa equals any of the naturally occurring L-amino acids
  SITE (210): Xaa equals any of the naturally occurring L-amino acids
  SITE (211): Xaa equals any of the naturally occurring L-amino acids
  SITE (218): Xaa equals any of the naturally occurring L-amino acids
  SITE (219): Xaa equals any of the naturally occurring L-amino acids
MALRLLRRAARGAAAAALLRLKASLAADIPRLGYSSSSHHKYIPRRAVLYVPGNDEKKIKKIPSLNVDCAVLDCEDGVAANKKNEARLRIVKTLEDIDLGPTEKCVRVNSVSSGLAEEDLETLLQSRVLPSSLMLPKVESPEEIQWAVCEETLKVGPQVGLFLDAVRFWRXRLSSHIGAXSXKETLDXLYARQKIVVIAKAFGLQAVXLXXIDFRDGXXLLRQSREGAAMGFTGKQVIHPNQIAVVQEQFSPSPEKIKWAEELIAAFKEHQQLGKGAFTFQGSMIDMPLLKQAQNTVTLATSIKEK

SEQ ID NO: 724 - protein, 64 aa, Homo sapiens; identical to SEQ ID NO: 548

SEQ ID NO: 725 - protein, 26 aa, Homo sapiens
MSFPHASTLPFHKLSDLQHTLPNHQG

SEQ ID NO: 726 - protein, 50 aa, Homo sapiens
  SITE (4): Xaa equals any of the naturally occurring L-amino acids
  SITE (10): Xaa equals any of the naturally occurring L-amino acids
  SITE (22): Xaa equals any of the naturally occurring L-amino acids
  SITE (35): Xaa equals any of the naturally occurring L-amino acids
  SITE (39): Xaa equals any of the naturally occurring L-amino acids
  SITE (42): Xaa equals any of the naturally occurring L-amino acids
VHAXTPFAGXCFDPVSLYWCYXNPGTHCYPTLRGXEQRXPSXRSHIVLRS

SEQ ID NO: 727 - protein, 957 aa, Homo sapiens [sequence omitted]

SEQ ID NO: 728 - protein, 57 aa, Homo sapiens; identical to SEQ ID NO: 566

SEQ ID NO: 729 - protein, 93 aa, Homo sapiens
  SITE (24): Xaa equals any of the naturally occurring L-amino acids
  SITE (65): Xaa equals any of the naturally occurring L-amino acids
QVSLPTRLLQMPGMGLDSRFQAWXPSPYLGPQPRAPRPGLQPGPSLRGAEFRESCPRSQKRGREXGRPCPGCRPGGWGLPARLGQPQLQTGPG

SEQ ID NO: 730 - protein, 172 aa, Homo sapiens
  SITE (170): Xaa equals any of the naturally occurring L-amino acids
MRGSVECTWGWGHCAPSPLLLWTLLLFAAPFGLLGEKTRQLLEFDSTNVSDTAAKPLGRPYPPYSLADFSWNNITDSLDPATLSATFQGHPMNDPTRTFANGSLAFRVQAFSRSSRPAQPPRLLHTADTCQLEVALIGASPRGNRSLFGLEVATLGQGPDCPSMQEQHSXER

SEQ ID NO: 731 - protein, 131 aa, Homo sapiens
MRGSVECTWGWGHCAPSPLLLWTLLLFAAPFGLLGEKTRQLLEFDSTNVSDTAAKPLGRPYPPYSLADFSWNNITDSLDPATLSATFQGHPMNDPTRTFANGSLAFRSRPFPGPADQPNPLASCTQQTPVS

SEQ ID NO: 732 - protein, 121 aa, Homo sapiens
MCFLMIFTFLVCWMPYIVICFLVVNGHGHLVTPTISIVSYLFAKSNTVYNPVIYVFMIRKFRRSLLQLLCLRLLRCQRPAKDLPAAGSEMQIRPIVMSQKDGDRPKKSDFQLFFHHFYHHQ

SEQ ID NO: 733 - protein, 49 aa, Homo sapiens
  SITE (41): Xaa equals any of the naturally occurring L-amino acids
MGAHSFGFQLFMSVSVLWGRLCLYGRFSVITFASPPTTFMXIQCCSHCS

SEQ ID NO: 734 - protein, 79 aa, Homo sapiens
SGWQVPSSVKHLPYDNLRSHCVADEGETEVEGTRATWVEHSGRPGVGSGRPPGTSLTTLPLLLTHLSLTCPLGGDFSKR

SEQ ID NO: 735 - protein, 484 aa, Homo sapiens
MPRHLSGLLLLLWPLLLLLPPTPAAPGPLARPGLRRLGTRGPGGSPGRRPGSAVPTRAPYSGAGQPGGARGAGVCRSRPLDLVFIIDSSRSVRPLEFTKVKTFVSQIIDTLDIGAADTRVAVVNYASTVKIEFHLQTHSDKQSLKQAVARITPLSTGTMSGLAIQTAMDEAFTVEAGARGPTSNIPKVAIIVTDGRPQDQVNEVAARARASGIELYAVGVDRADMESLKMMASEPLDEHVFYVETYGVIEKLSSRFQETFCALDPCVLGTHRCQHVCVSDGEGKHHCECSQGYSLNADQKTCSAIDKCALNTHGCEHICVNDRTGSYHCECYEGYTLNQDRKTCSAQDQCAFGTHGCQHICVNDRDGSHHCECYEGYTLNADNKTCSVRSECAGGSHGCQHLCVDDGPAAYHCDCFPGYTLTEDRRTCAAIEEARRLVSTEDACGCEATLAFQERASSYLQRLNAKLDDILGKLQADAYGQIHR

SEQ ID NO: 736 - protein, 266 aa, Homo sapiens
  SITE (45): Xaa equals any of the naturally occurring L-amino acids
  SITE (47): Xaa equals any of the naturally occurring L-amino acids
  SITE (51): Xaa equals any of the naturally occurring L-amino acids
  SITE (134): Xaa equals any of the naturally occurring L-amino acids
  SITE (183): Xaa equals any of the naturally occurring L-amino acids
  SITE (222): Xaa equals any of the naturally occurring L-amino acids
  SITE (224): Xaa equals any of the naturally occurring L-amino acids
  SITE (255): Xaa equals any of the naturally occurring L-amino acids
MPRHLSGLLLLLWPLLLLLPPTPAAPGPLARPGLRRLGTRGPGGXPXRRPXSAVPTRAPYSGAGQPGGARGAGVCRSRPLDLVFIIDSSRSVRPLEFTKVKTFVSQIIDTLDIGAADTRVAVVNYASTVKIEFXLQTHSDKQSLKQAVARITPLSTGTMSGLAIQTAMDEAFTVEAGARGPTXNIPKVAIIVTDGRPQDQVNEVAARARASGIELYAVGVDXAXMESLQDEWPAKPLDEHVFYVETYGVIEKPSXRFQETLLRSWN

SEQ ID NO: 737 - protein, 5 aa, Homo sapiens
VLLIL

SEQ ID NO: 738 - protein, 84 aa, Homo sapiens
KMHFNKNKSILKSFSFVRGNMNEIHSYLKTEYFTAKTLNISRAYHILNTLWSCSYFNIPGSGGQLACLWLRICFHACFLSFFYL

SEQ ID NO: 739 - protein, 77 aa, Homo sapiens
  SITE (8): Xaa equals any of the naturally occurring L-amino acids
  SITE (9): Xaa equals any of the naturally occurring L-amino acids
  SITE (10): Xaa equals any of the naturally occurring L-amino acids
  SITE (16): Xaa equals any of the naturally occurring L-amino acids
LGGYALSXXXNRVTDXVMIYFFIIIVEYFYGKIFVVLIIPIKIMPNTKYEFYDVHFVLGIKRKKHTSWKSVSCFLLL

SEQ ID NO: 740 - protein, 84 aa, Homo sapiens
TYSFCVCERAFVFGSVPRAEVEQGCTYHGKGGRKENWIACDLWWNLFLLPRPFRPCLISVGHFRLWQGRAGLQSEVPASSLEHN

SEQ ID NO: 741 - protein, 161 aa, Homo sapiens
  SITE (123): Xaa equals any of the naturally occurring L-amino acids
  SITE (129): Xaa equals any of the naturally occurring L-amino acids
  SITE (145): Xaa equals any of the naturally occurring L-amino acids
  SITE (146): Xaa equals any of the naturally occurring L-amino acids
  SITE (157): Xaa equals any of the naturally occurring L-amino acids
MTTWSCLVAMIVSGVITAVWAVRAAPIWRSQVKQKMRIGKQGNCRPPRCICSALGLLAPWMAVVLSQLSVRCVVSWVQGKPSSPRPRGSAASPAPGATPPTPRKPVSWLGYRENHRPKKPKSXTRCLVXQNWSLPPISKDRTAGXXDTNRTRRSGLXLRLG

SEQ ID NO: 742 - protein, 325 aa, Homo sapiens
  SITE (10): Xaa equals any of the naturally occurring L-amino acids
  SITE (136): Xaa equals any of the naturally occurring L-amino acids
  SITE (186): Xaa equals any of the naturally occurring L-amino acids
  SITE (234): Xaa equals any of the naturally occurring L-amino acids
VPPAVCPAGXFCQNQCFTKRQYPETKIIKTDGKGWGLVAKRDIRKGEFVNEYVGELIDEEECMARIKHAHENDITHFYMLTIDKDRIIDAGPKGNYSRFMNHSCQPNCETLKWTVNGDTRVGLFAVCDIPAGTELXFNYNLDCLGNEKTVCRCGASNCSGFLGDRPKTSTTLSSEEKGKKTKKKTXRRRAKGEGKRQSEDECFRCGDGGQLVLCDRKFCTKAYHLSCLGLGKRXFGKWECPWHHCDVCGKPSTSFCHLCPNSFCKEHQDGTAFSCTPDGRSYCCEHDLGAASVRSTKTEKPPPEPGKPKGKRRRRRGWRRVTEGK

SEQ ID NO: 743 - protein, 40 aa, Homo sapiens; identical to SEQ ID NO: 586

SEQ ID NO: 744 - protein, 173 aa, Homo sapiens
MVFLKFFCMSFFCHLCQGYFDGPLYPEMSNGTLHHYFVPDGDYEENDDPEKCQLLFRVSDHRRCSQGEGSQVGSLLSLTLREEFTVLGHQVEGCWARAGGHQQKHLLRPRRGRELWQVPAAGVPPDRGMPTPTRTNPSLSWRASSSRARNRTAGRRAGSTRTFWECWSTPGPC

SEQ ID NO: 745 - protein, 48 aa, Homo sapiens [sequence omitted]

SEQ ID NO: 746 - protein, 10 aa, Homo sapiens
IYQHFSLWLG

SEQ ID NO: 747 - protein, 4 aa, Homo sapiens
MFKM

SEQ ID NO: 748 - protein, 80 aa, Homo sapiens; identical to SEQ ID NO: 592

SEQ ID NO: 749 - protein, 145 aa, Homo sapiens
DPSGSFMGRSVMMRILGSPVFFPMHDTSVCLTYPNFYTVVSPTGSRPPSRNWNSETPGDEELGFEAAVAALGMKTTVSEAEHPLLCEGTRREKGDLALALMITYKDDQAKLKKKISRAWWRAPVVPATREAEVGELLEPRSLRLQ

SEQ ID NO: 750 - protein, 201 aa, Homo sapiens [sequence omitted]

SEQ ID NO: 751 - protein, 392 aa, Homo sapiens
  SITE (251): Xaa equals any of the naturally occurring L-amino acids
MAPWPPKGLVPAVLWGLSLFLNLPGPIWLQPSPPPQSSPPPQPHPCHTCRGLVDSFNKGLERTIRDNFGGGNTAWEEENLSKYKDSETRLVEVLEGVCSKSDFECHRLLELSEELVESWWFHKQQEAPDLFQWLCSDSLKLCCPAGTFGPSCLPCPGGTERPCGGYGQCEGEGTRGGSGHCDCQAGYGGEACGQCGLGYFEAERNASHLVCSACFGPCARCSGPEESNCLQCKKGWALHHLKCVDCAKACXGCMGAGPGRCKKCSPGYQQVGSKCLDVDECETEVCPGENKQCENTEGGYRCICAEGYKQMEGICVKEQIPESAGFFSEMTEDELVVLQQMFFGIIICALATLAAKGDLVFTAIFIGAVAAMTGYWLSERSDRVLEGFIKGR

SEQ ID NO: 752 - protein, 63 aa, Homo sapiens [sequence omitted]

SEQ ID NO: 753 - protein, 102 aa, Homo sapiens
MTVRRLSLLCRDLWALWLLLKAGAVRGARAGPRLPGRCCGATCGDAGRGWTFWAQPCPQKLLGQKPGAGGCRGWVLGWVPPRPEEPCSLAGKVCTGLARWMV

SEQ ID NO: 754 - protein, 53 aa, Homo sapiens
  SITE (41): Xaa equals any of the naturally occurring L-amino acids
MCKAVCKHRLRLFAVSSFSLGLGWVCVLVLMLWPVRLSLAXRPVQLQQRRSHC

SEQ ID NO: 755 - protein, 472 aa, Homo sapiens; identical to SEQ ID NO: 597

SEQ ID NO: 756 - protein, 178 aa, Homo sapiens
SIYSPHTGIQEYQDGVPKIPTACITVEDAEMMSRMASHGIKIVIQLKMGAKTYPDTDSFNTVAEITGSKYPEQVVLVSGHLDSWDVGQGAMDDGGGAFISWEALSLIKDLGLRPKRTLRLVLWTAEEQGGVGAFQYYQLHKVNISNYSLVMESDAGTFLPTGLQFTGSEKARASWRRL

SEQ ID NO: 757 - protein, 199 aa, Homo sapiens
  SITE (142): Xaa equals any of the naturally occurring L-amino acids
MKLGCVLMAWALYLSLGVLWVAQMLLAASFETLQCEGPVCTEESSCHTEDDLTDAREAGFQVKAYTFSEPFHLIVSYDWLILQGPAKPVFEGDLLVLRCQAWQDWPLTQVTFYRDGSALGPPGPNREFSITVVQKADSGHYXCSGIFQSPGPGIPETASVVAITVQELFPAPILLLQGWKDSAKQGGSPQNSRSPQLQK

SEQ ID NO: 758 - protein, 2 aa, Homo sapiens
SW

SEQ ID NO: 759 - protein, 32 aa, Homo sapiens
CLETFWSLYLGGWGMVGCVCYWHPVNRSQGCR

SEQ ID NO: 760 - protein, 283 aa, Homo sapiens
MYLSALQSLIPSLFALVLQNAPFSSKAKLHGEVPQIEVTRFPRPMSPLQDVSTIIGSREQLAVLLQLYDYQLEQEGTTGWESLLWVVNQLLPQLIEIVGKINVTSTACVHEFSRFFWRLCRTFGKIFTNTKVKPQFQEILRLSEENIDSSAGNGVLTKATVPIYATGVLTCYIQEEDRKLLVGFLEDVMTLLSLSHAPLDSLKASFVELGANPAYHELLLTVLWYGVVHTSALVRCTAARMFEVCQHMPLLVSIIMIFFFLRRRREFFLIKRLCISKKKKKKK

SEQ ID NO: 761 - protein, 286 aa, Homo sapiens
  SITE (204): Xaa equals any of the naturally occurring L-amino acids
  SITE (224): Xaa equals any of the naturally occurring L-amino acids
  SITE (228): Xaa equals any of the naturally occurring L-amino acids
  SITE (264): Xaa equals any of the naturally occurring L-amino acids
  SITE (271): Xaa equals any of the naturally occurring L-amino acids
MYLSALQSLIPSLFALVLQNAPFSSKAKLHGEVPQIEVTRFPRPMSPLQDVSTIIGSREQLAVLLQLYDYQLEQEGTTGWESLLWVVNQLLPQLIEIVGKINVTSTACVHEFSRFFWRLCRTFGKIFTNTKVKPQFQEILRLSEENIDSSAGNGVLTKATVPIYATGVLTCYIQEEDRKLLVGFLEDVMTLLSLSHAPLDSLKXSFVELGANQAYHELLLTVLXYGVXHTSALVRCTAARMFELLVKGVNETLVAQRVVPALHXLSPVDPXNLCQDCHNFQPLGLF

SEQ ID NO: 762 - protein, 45 aa, Homo sapiens
  SITE (43): Xaa equals any of the naturally occurring L-amino acids
MQAPLQDCGRSVSLRLACVLAPLTTSSRGCHLQLPQDKGKARXDS

SEQ ID NO: 763 - protein, 305 aa, Homo sapiens
MGILLGLLLLGHLTVDTYGRPILEVPESVTGPWKGDVNLPCTYDPLQGYTQVLVKWLVQRGSDPVTIFLRDSSGDHIQQAKYQGRLHVSHKVPGDVSLQLSTLEMDDRSHYTCEVTWQTPDGNQVVRDKITELRVQKHSSKLLKTKTEAPTTMTYPLKATSTVKQSWDWTTDMDGYLGETSAGPGKSLPVFAIILIISLCCMVVFTMAYIMLCRKTSQQEHVYEAARAHAREANDSGETMRVAIFASGCSSDEPTSQNLGNNYSDEPCIGQEYQIIAQINGNYARLLDTVPLDYEFLATEGKSVC

SEQ ID NO: 764 - protein, 72 aa, Homo sapiens
MKFVPCLLLVTLSCLGTLGQAPRQKQGSTGEEFHFQTGGRDSCTMRPSSLGQGAGEVWLRVRLPQHRPDLLV

SEQ ID NO: 765 - protein, 121 aa, Homo sapiens
MGLWLGMLACVFLATAAFVAYTARLDWKLAAEEAKKHSGRQQQQRAESTATRPGPEKAVLSSVATGSSPGITLTTYSRSECHVDFFRTPEEAHALSAPTSRLSVKQLVIRRGAALGAASAH

SEQ ID NO: 766 - protein, 327 aa, Homo sapiens
  SITE (300): Xaa equals any of the naturally occurring L-amino acids
MWRPSVLLLLLLLRHGAQGKPSPDAGPHGQGRVHQAAPLSDAPHDDAHGNFQYDHEAFLGREVAKEFDQLTPEESQARLGRIVDRMDRAGDGDGWVSLAELRAWIAHTQQRHIRDSVSAAWDTYDTDRDGRVGWEELRNATYGHYAPGEEFHDVEDAETYKKMLARDERRFRVADQDGDSMATREELTAFLHPEEFPHMRDIVIAETLEDLDRNKDGYVQVEEYIADLYSAEPGEEEPAWVQTERQQFRDFRDLNKDGHLDGSEVGHWVLPPAQDQPLVEANHLLHESDTDKDGRLSKAXILGNWNMFVGSQATNYGEDLTRHHDEL

SEQ ID NO: 767 - protein, 184 aa, Homo sapiens
  SITE (140): Xaa equals any of the naturally occurring L-amino acids
  SITE (145): Xaa equals any of the naturally occurring L-amino acids
  SITE (146): Xaa equals any of the naturally occurring L-amino acids
  SITE (148): Xaa equals any of the naturally occurring L-amino acids
  SITE (165): Xaa equals any of the naturally occurring L-amino acids
MWRPSVLLLLLLLRHGAQGKPSPDAGPHGQGRVHQAAPLSDAPHDDAHGNFQYDHEAFLGREVAKEFDQLTPEESQARLGRIVDRMDRAGDGDGWVSLAELRAWIAHTQQRHIRDSVSAAWDTYDTDRDGRVGWEELRNXTYGHXXPXEEFHDVEDAETYKKMLXRDERRFRVADQDGDSMATR

SEQ ID NO: 768 - protein, 509 aa, Homo sapiens
MTWRMGPRFTMLLAMWLVCGSEPHPHATIRGSHGGRKVPLVSPDSSRPARFLRHTGRSRGIERSTLEEPNLQPLQRRRSVPVLRLARPTEPPARSDINGAAVRPEQRPAARGSPREMIRDEGSSARSRMLRFPSGSSSPNILASFAGKNRVWVISAPHASEGYYRLMMSLLKDDVYCELAERHIQQIVLFHQAGEEGGKVRRITSEGQILEQPLDPSLIPKLMSFLKLEKGKFGMVLLKKTLQVEERYPYPVRLEAMYEVIDQGPIRRIEKIRQKGFVQKCKASGVEGQVVAEGNDGGGGAGRPSLGSEKKKEDPRRAQVPPTRESRVKVLRKLAATAPAFPQPPSTPRATTLPPAPATTVTRSTSRAVTVAARPMTTTAFPTTQRPWTPSPSHRPPTTTEVITARRPSVSENLYPPSRKDQHRERPQTTRRPSKATSLESFTNAPPTTISEPSTRAAGPGRFRDNRMDRREHGHRDPNVVPGPPKPAKEKPPKKKAQDKILSNEYEEV

SEQ ID NO: 769 - protein, 554 aa, Homo sapiens
MGPRFTMLLAMWLVCGSEPHPHATIRGSHGGRKVPLVSPDSSRPARFLRHTGRSRGIERSTLEEPNLQPLQRRRSVPVLRLARPTEPPARSDINGAAVRPEQRPAARGSPREMIRDEGSSARSRMLRFPSGSSSPNILASFAGKNRVWVISAPHASEGYYRLMMSLLKDDVYCELAERHIQQIVLFHQAGEEGGKVRRITSEGQILEQPLDPSLIPKLMSFLKLEKGKFGMVLLKKTLQVEERYPYPVRLEAMYEVIDQGPIRRIEKIRQKGFVQKCKASGVEGQVVAEGNDGGGGAGRPSQGSEKKKEDPRRAQVPPTRESRVKVLRKLAATAPAFPQPPSTPRATTLTPAPATTVTRSTSRAGNRCCKTYDHHWLSHHAEALDPLTLPTGPLQPLRVITARRPSVSRESLPSIPGRISTGRGHRQPGGPARPTSLESFTNAPPTTISEPSTRAAGPGRFRDNRMDRREHGHRDPNVVPGPPKPAKEKPPKKKAQDKILSNEYEEKYDLSRPTASQLEDELQVGNVPLKKAKESKKHEKLEKPEKEKKKKKKK

SEQ ID NO: 770 - protein, 23 aa, Homo sapiens
MLALLGLLAGTEHPPGPQGPGPS

SEQ ID NO: 771 - protein, 25 aa, Homo sapiens
MVNIFGFVSCIVFVVAVQLCYMKQP

SEQ ID NO: 772 - protein, 40 aa, Homo sapiens
MLFPLLAWPHLLSLWVCLTATSPSKPSAPHSHQMDLCLLH

SEQ ID NO: 773 - protein, 305 aa, Homo sapiens; identical to SEQ ID NO: 621

SEQ ID NO: 774 - protein, 122 aa, Homo sapiens
  SITE (92): Xaa equals any of the naturally occurring L-amino acids
  SITE (100): Xaa equals any of the naturally occurring L-amino acids
  SITE (109): Xaa equals any of the naturally occurring L-amino acids
  SITE (116): Xaa equals any of the naturally occurring L-amino acids
MLALTLAKADSPRTALLCSAWLLTASFSAQQHKGSLQVHQTLSVEMDQVLKALSFPKKKAALLSTAILCFLRTALRQSFSSAWNPGALKGPXTAATKDTXLTSLRMSKXGPGHWAXKTSWCK

SEQ ID NO: 775 - protein, 216 aa, Homo sapiens
  SITE (6): Xaa equals any of the naturally occurring L-amino acids
  SITE (18): Xaa equals any of the naturally occurring L-amino acids
CFPWGXALRQKLFPSALXALVPSGAQPLPATKDTVLAPLRMSQVRSLVIGLQNLLVQKDPLLSQACVGCLEALLDYLDARSPDIALHVASQPWNRFLLFTLLDAGENSFLRPEILRLMTLFMRYRSSSVLSHEEVGDVLQGVALADLSTLSNTTLQALHGFFQQLQSMGHLADHSMAQTLQASLEGLPPSTSSGQPPLQDMLCLGGVAVSLSHIRN

SEQ ID NO: 776 - protein, 127 aa, Homo sapiens
MLPLLIICLLPAIEGKNCLRCWPELSALIDYDLQILWVTPGPPTELSQSIHSLFLEDNNFLKPWYLDRDHLEEETAKFFTQVHQAIKTLRDDKTVLLEEIYTHKNLFTERLNKISDGLKEKEPHPSP

SEQ ID NO: 777 - protein, 164 aa, Homo sapiens
  SITE (126): Xaa equals any of the naturally occurring L-amino acids
MLPLLIICLLPAIEGKNCLRCWPELSALIDYDLQILWVTPGPPTELSQSIHSLFLEDNNFLKPWYLDRDHLEEETAKFFTQVHQAIKTLRDDKTVLLEEIYTHKNLFTERLNKISDGLKEKGAPPXSMNAFPAPSPTCTPEPLGSVCLPSTSVSLPSHLPGSLQ

SEQ ID NO: 778 - protein, 159 aa, Homo sapiens
MWLFILLSLALISDAMVMDEKVKRSFVLDTASAICNYNAHYKNHPKYWCRGYFRDYCNIIAFSPNSTNHVALKDTGNQLIVTMSCLNKEDTGWYWCGIQRDFARDDMDFTELIVTDDKGTWPMTLVWERLSGTKPEAARLPKLSARLTAPGRPFSSFAY

SEQ ID NO: 779 - protein, 71 aa, Homo sapiens
  SITE (40): Xaa equals any of the naturally occurring L-amino acids
  SITE (51): Xaa equals any of the naturally occurring L-amino acids
  SITE (55): Xaa equals any of the naturally occurring L-amino acids
MWLFILLSLALISDAMVMDEKVKRSLCWTRLLPSATTMPXTRITPNTGAEXISVXTATSSPSPLTAPIMWP

SEQ ID NO: 780 - protein, 71 aa, Homo sapiens; identical to SEQ ID NO: 634

SEQ ID NO: 781 - protein, 140 aa, Homo sapiens
  SITE (136): Xaa equals any of the naturally occurring L-amino acids
MASLGLQLVGYILGLLGLLGTLVAMLLPSWKTSSYVGASIVTAVGFSKGLWMECATHSTGITQCDIYSTLLGLPADIQAAQAMMVTSSAISSLACIISVVGMRCTVFCQESRAKDRVAVAGGVFFILGSLLGFIPXAWNL

SEQ ID NO: 782 - protein, 86 aa, Homo sapiens
  SITE (33): Xaa equals any of the naturally occurring L-amino acids
  SITE (43): Xaa equals any of the naturally occurring L-amino acids
RRFYSPLVPDSMKFEIGEALYLGIISSLFSLIXGIILCFSCSXQRNRSNYYDAYQAQPLATRSSPRPGQPPKVKSEFNSYSLTGYV

SEQ ID NO: 783 - protein, 42 aa, Homo sapiens; identical to SEQ ID NO: 638

SEQ ID NO: 784 - protein, 76 aa, Homo sapiens
INFTYKRLSLDFIYIYMCVCVCVCVCVCVCVYLKRTCASIKGNKMREYIIDFVKSKYLNYGFSIFKNSCSFCTYFF

SEQ ID NO: 785 - protein, 111 aa, Homo sapiens; identical to SEQ ID NO: 640

SEQ ID NO: 786 - protein, 78 aa, Homo sapiens; identical to SEQ ID NO: 642

SEQ ID NO: 787 - protein, 53 aa, Homo sapiens
MVTFINATLWIAVFSYIMVWLVTIIGYTLGIPDVIMGITFLAAGQVFQTAWPA

SEQ ID NO: 788 - protein, 169 aa, Homo sapiens
  SITE (6): Xaa equals any of the naturally occurring L-amino acids
  SITE (39): Xaa equals any of the naturally occurring L-amino acids
  SITE (44): Xaa equals any of the naturally occurring L-amino acids
  SITE (71): Xaa equals any of the naturally occurring L-amino acids
MVTFIXATLWIAVFSYIMVWLVTIIGYTLGIPDVIMGIXFLAAXTSVPDCMASLIVARQGLGDMAVSNTIXSNVFDILVGLGVPWGLQTMVVNYGSTVKINSRGLVYSVVLLLGSVALTVLGIHLNKWRLDRKLGVYVLVLYAIFLCFSIMIEFNVFTFVNLPMCREDD

SEQ ID NO: 789 - protein, 105 aa, Homo sapiens
  SITE (69): Xaa equals any of the naturally occurring L-amino acids
MSGLAAAAHVFRVCLFPLSWGSSKTTFIHGLSSYIATPVLNSIFSSWKSRRKDTWTCLLHRLSAFPISXRRRNFALFSHSCVCIRSSSDDVGPTMYSFSVPCRVK

SEQ ID NO: 790 - protein, 886 aa, Homo sapiens
  SITE (26): Xaa equals any of the naturally occurring L-amino acids
  SITE (216): Xaa equals any of the naturally occurring L-amino acids
  SITE (234): Xaa equals any of the naturally occurring L-amino acids
  SITE (275): Xaa equals any of the naturally occurring L-amino acids
  SITE (871): Xaa equals any of the naturally occurring L-amino acids
MAARGRGLLLLTLSVLLAAGPSAAAXKLNIPKVLLPFTRATRVNFTLEASEGCYRWLSTRPEVASIEPLGLDEQQCSQKAVVQARLTQPARLTSIIFAEDITTGQVLRCDAIVDLIHDIQIVSTTRELYLEDSPLELKIQALDSEGNTFSTLAGLVFEWTIVKDSEADRFSDSHNALRILTFLESTYIPPSYISEMEKAAKQGDTILVSGMKTGSXKLKARIQEAVYKNVRPAXVRLLILENILLNPAYDVYLMVGTSIHYKVQKIRQGKITELXMPSDQYELQLQNSIPGPEGDPTRPVAVLAQDTSMVTALQLGQSSLVLGHRSIRMQGASRLPNSTIYVVEPGYLGFTVHPGDRWVLETGRLYEITIEVFDKFSNKVYVSDNIRIETVLPAEFFEVLSSSQNGSYHRIRALKRGQTAIDAALTSVVDQDGGVHILQVPVWNQQEVEIHIPITLYPSILTFPWQPKTGAYQYTIRAHGGSGNFSWSSSSHLVATVTVKGVMTTGSDIGFSVIQAHDVQNPLHFGEMKVYVIEPHSMEFAPCQVEARVGQALELPLRISGLMPGGASEVVTLSDCSHFDLAVEVENQGVFQPLPGRLPPGSEHCSGVRVKAEAQGSTTLLVSYRHGHVHLSAKITIAAYLPLKAVDPSSVALVTLGSSKEMLFEGGPRPWILEPSKFFQNVTAEDTDSIGLALFAPHSSRNYQQHWILVTCQALGEQVIALSVGNKPSLTNPFPAVEPAVVKFVCAPPSRLTLVPVYTSPQLDMSCPLLQQNKQVVPVSSHRNPLLDLAAYDQEGRRFDNFSSLSIQWESTRPVLASIEPELPMQLVSQDDESGQKKLHGLQAILVHEASGTTASLPLPLATRSPTSALXEQSSRMTLWCLCRPP

SEQ ID NO: 791 - protein, 498 aa, Homo sapiens
  SITE (11): Xaa equals any of the naturally occurring L-amino acids
  SITE (20): Xaa equals any of the naturally occurring L-amino acids
  SITE (398): Xaa equals any of the naturally occurring L-amino acids
EALGGRCLWEXPVTFTVHFXDNSGDVFHAHSSVLNFATNRDDFVQIGKGPTNNTCVVRTVSVGLTLLRVWDAEHPGLSDFMPLPVLQAISPELSGAMVVGDVLCLATVLTSLEGLSGTWSSSANSILHIDPKTGVAVARAVGSVTVYYEVAGHLRTYKEVVVSVPQRIMARHLHPIQTSFQEATASKVIVAVGDRSSNLRGECTPTQREVIQALHPETLISCQSQFKPAVFDFPSQDVFTVEPQFDTALGQYFCSITMHRLTDKQRKHLSMKKTALVVSASLSSSHFSTEQVGAEVPFSPGLFADQAEILLSNHYTSSEIRVFGAPEVLENLEVKSGSPAVLAFAKEKSFGWPSFITYTVGVLDPAAGSQGPLSTTLTFSSPVTNQAIAIPVTVAFVXDRRGPGPYGASLFQHFLDSYQVMFFTLFALLAGTAVMIIAYHTVCTPRDLAVPAALTPRASPGHSPHYFAASSPTSPNALPPARKASPPSGLWSPAYASH

SEQ ID NO: 792 - protein, 112 aa, Homo sapiens
  SITE (103): Xaa equals any of the naturally occurring L-amino acids
  SITE (112): Xaa equals any of the naturally occurring L-amino acids
MKTLLLLVGLLLTWENGRVLGDQMVSDTELQEMSTEGSKYINREIKNALKGVKQIKTLIEQTNEERKSLLTNLEEAKKKKEDALNDTKDSEMKLKASPGVFNXTLDGPLGGX

SEQ ID NO: 793 - protein, 112 aa, Homo sapiens
  SITE (71): Xaa equals any of the naturally occurring L-amino acids
  SITE (103): Xaa equals any of the naturally occurring L-amino acids
  SITE (112): Xaa equals any of the naturally occurring L-amino acids
MKTLLLLVGLLLTWENGRVLGDQMVSDTELQEMSTEGSKYINREIKNALKGVKQIKTLIEQTNEERKSLLXNLEEAKKKKEDALNDTKDSEMKLKASPGVFNXTLDGPLGGX

SEQ ID NO: 794 - protein, 139 aa, Homo sapiens
MKTLLLLVGLLLTWENGRVLGDQMVSDTELQEMSTEGSKYINREIKNALKGVKQIKTLIEQTNEERKSLLTNLEEAKKKKEDALNDTKDSEMKLKASQGVCNDTMMALWEECKPCLKQTWGKGLRPSLQKQHRAGWPPG

SEQ ID NO: 795 - protein, 7 aa, Homo sapiens
LLVVLLS

SEQ ID NO: 796 - protein, 14 aa, Homo sapiens
LLLVGLQQLVVQAW

SEQ ID NO: 797 - protein, 288 aa, Homo sapiens
  SITE (10): Xaa equals any of the naturally occurring L-amino acids
  SITE (15): Xaa equals any of the naturally occurring L-amino acids
  SITE (268): Xaa equals any of the naturally occurring L-amino acids
  SITE (271): Xaa equals any of the naturally occurring L-amino acids
  SITE (273): Xaa equals any of the naturally occurring L-amino acids
  SITE (274): Xaa equals any of the naturally occurring L-amino acids
  SITE (276): Xaa equals any of the naturally occurring L-amino acids
  SITE (286): Xaa equals any of the naturally occurring L-amino acids
FSSSACPSVXSLFVXLGKNPHDAQGHPRASEDQPSSGKPVTSYPGECGFVFTKEASLEIRDMLLANKVPAAARAGAIAPCEVTVPAQNTGLGPEKTSFFQALGITTKISRGTIEILSDVQLIKTGDKVGASEATLLNMLNISPFSFGLIIQQVFDNGSIYNPEVLDITEETLHSRFLEGVRNVASVCLQIGYPTVASVPHSIINGYKRVLALSVETDYTFPLAEKVKAFLADPSAFVAAAPVAAATTAAPAAAAAPAKVEAKEESEEXDEXIXXSXISKSNNSSQXIV

SEQ ID NO: 798 - protein, 97 aa, Homo sapiens
MYRAIDSFPRWRSYFYFITLIFFLAWLVKNVFIAVIIETFAEIRVQFQQMWGSRSSTTSTATTQMFHEDAAGGWQLVAVGCQQAPGTRPSLPPGAVQ

SEQ ID NO: 799 - protein, 80 aa, Homo sapiens
GNRSFTRNLRCNWTQGYRWSTALLISLTLGGFGADRFYLGHWQEGIGKLFSFGGLGVWTIIDVLLISMHYLGPADGSLYI

SEQ ID NO: 800 - protein, 81 aa, Homo sapiens
GNEVGFFKPISCRNVNGYSYKVAVALSLFLGWLGADRFYLGYPALGLLKFCTVGFCGIGSLIDFILISMQIVGPSDGSSYI

SEQ ID NO: 801 - DNA, 15090 bp, Homo sapiens
acgttccctacttcctgtgctcttgcggagacgcgcgcgtcggggtttaacgcgtttctgggccgccgtaagcccggcctaggggcagctttgactcgagagccggctataggcgcatggaaggttccctggaacgggaggcgccagcgggggcgctggccgccgtgctaaagcacagctcgacgttgccgcccgaaagcacccaggtccggggctacgacttcaaccgcggtgtgaattaccgcgcactgctggaggccttcggcaccaccggcttccaagcaaccaacttcgggcgcgctgtacagcaagtcaatgccatggtgaggaccgggcggaatttctagggacgcggaggggcgtggcttgtagaaccaacgcggtactagacgggggcagcgtttccagtggaggggatatgtcttttatttgagttgcccaatagttggaggaaggcgggacctattctgggcgggagtttctgtcctgggaaggggattttgcactctggtagttacatgctggtacggtaacctgaggaggcgaggactgattcttggtgtgggggcgggttctaggtacatttaaagctttctggaatgggcggagcctggggcaagacaaattaagggaggatatgggaggaggagcctaagtctgggcggttcttgaatttagatttgcttttcccagcggggaagggaccggatctgaaaggagatgctctctgattcctaaaagggtgggggctggctgggcgcggtggcgcatgcctataatcccagcattttgggaagccgaggcgggtggatcaagagaagaggagttcgagacaagcctggccaacatggtgaaaccctgtctctactaaaatgcaaaaaattagccgggcatggtgttgcgcgcctgtagtcccagctactcgggaggctgaggcaggagaatcgcttgaacccgcgaggtggaggttgcagtgagctgagattgcgccactgcactccagcctggtgacagagcgatactctgtctcaaaaaaaaaaaaaaaaaaaggccgggcacggtggctcatgcctgtaatctcagcattttgggaggccgaggcgggcggatcacctgaggtcgggagttcgagaccagcctgaccaacatggagaaaccccgtctctactaaaatgcaaaaaattagccgggcatggtggtgcgcgcctgtagtcccagctactcgggaggctgaggcaggagaatcgcttgaacccgggaggtggagcttgcagtgagccgagatcgcgccattgcactctagcctgggtaacaagagtgaaactccgtccaaaaaaaaaaaaaaaagggtgggggcaaatcctgaacgtgtgtcttgagatctggtctgggaaggggcagagtttacacaggagatgttccttggtcccctgtagaactggtcctgtatccctgaatgtgcagggcctggggtgaaatctgtttctggagcccacctggagtcctgagtctgggatttaaggccagtgcttaacttgacttggcccttactcacagatcgagaagaagctggaaccactgtcacaggatgaagaccagcacgcggacctgacccagagccgccgcccacttaccagctgcaccattttcctgggatatacatccaacctcatcagttcaggcatccgtgagaccattcgctaccttgtgcagcacaacatggtggggacctggtgaggccgtggccttggcctctgggtcaatgggcaatgcagttattgatcgtttaagtgagatgggcagataggggtctgttataagcagaggaatagaatcaagttttgttttgtagcagagctccctcataagagtcactggacaaggatgaggttagaagttctgcccagaatgagggcaggggcttccttcttgggccaaattcactgccttgtggctgcaggtggacgtattggtgaccacagctggcggcgtggaggaagacctcatcaagtgcctggcgcccacatacttgggcgagtttagcctcagggggaaggagctccgggagaacgggatcaataggtgagaaccctgagtggtgttgggcaggggagctggaccaagggtcctggggcctgatgcctacatgcctcctgttctcaggatcggaaacctgctggtgcccaatgagaattactgcaagtttgaggactggctgatgcccattctggaccagatggtgatggagcagaacacagaggtggggctggggcaacctggaggggccagttcagtgggagtcaggggaggcatggcctgaaggtcacatcctctcctagggtgtaaagtggacgccttctaagatgatcgcccggctgggcaaggagatcaacaacccagagtccgtgtattactgggcccagaaggtgaggacctaagcgggagcaaagtagccagactttggcatgtgttaacttatttcatctttccagcctcctggggattcagtactgttattctcagcatcctcactcttagatgaggagactcaaacacagataggcgtggtaattttttttttttttgagacaggatcttgctctgtcacctaggctggagtgcagtggtgtgatcacagctcattgcagcctcaacctcctggggccaagcagtcctcccacctcagcctctcgagtagctgggaccacaggcacatgccatcatgcccagctaattttaaaaattttttgtagagatgggggtctccctgtgtttcccaggctggtcttgaactcctggcgtcaggcagtcctcccaccttggcctcccaaagtgctgggattacaggcgtgagccactgtgcccagccaggctaggtaattttgtctgaagtcacacagataactagtggggcctcagcatccttatgctcctcccagactatctctggaacagtagaggcaacacttagcaactctcctggggcctggctcagggtcccacactcccagatgctataaaataagagctacccactccctttaattagagaatcagaacctgaaaaaaaaaaaaaaaaagctacatagtctttttttttttttttttttttttgagacagagtcttgctctgtcgcccaggctggagtgtaatggtgtgatttcagctcactgcaccctccacctcccaggttcaagtgattctcccgcctcaccctcctgagtagctgggactataggcacccaccatcatgcccggccaatttttgtatttttctacagatggggtttcaccatgttggccaggctggtcttgaactcctgacctcaagtgatccacccgccttggcctcccaaagtgctgggattacaggggtgagccaccacacccagcctacttactctttcttttttacgagacagggtctcattctgtttcccaggctggagtgcaatggcacaataatggctcactgctgtcttgagcttctgggctcagtcgattctcctgcctcagcctgctgagtagctgggactacaggtgcgtgccaccatgcctggctaattgtttttgtagagatgggaactcaccatgttgcacaagctggctctttttttttttttgagacggagttttgctcttgttacccaggccagagtccaatggcgcaatcttggctcacagcaacctctacctcctgggttcaagcaattctcctgcctcagcatcaagttcccaagtagctgggattataggcatgtgccaccacccctggctaattttgtatttttagtagaggcagggtttctccatgttggtcaggctggtgtcgagctcctgacctcaggtgatccacccgcctcggcctcccaaagtgctgggattacaagcgtgagccaccgcgcccggccacaagctggctctttaaaaaagaattagacggccgggcacggtggctcatgcttgtaatcccagtactttgggggctgaggcgggtggatcacctgaagtcaggagttcaagaccagcctggccaacatggtggaaccctgtctctactaaaaaaacaaaatgcaaaattagctgggcatagtggcatgcgcctgtaatcctagctactcgggaggctgaagcaggagaatcactggaacccaggaggcagaggttgcagtgagctgagatagtgccattgcactccagcctgggcaacgagtgaaactccgtctcagggaataaaaaaaaagagagagaaacagctcagcaagctaagaataggctggttctttatgtgccaggcactatactaagtgttttctgtgggttttctcatataggcctcatctgtgagaggtgtttctgttatgcttataattgaggaaacagtcctagagaaattaggcaccccatccacagtcagatagtcatatagccagcatggagacgaggctctgagctccagccactgtcctgtcatgttctctgcagaaccacatccctgtgtttagtcccgcacttacagacggctcgctgggcgacatgatcttcttccattcctacaagaacccgggcctggtcctggacatcgttgagggtgaggcgctagggccacagaggagaggggaaggagggctggctgagtccaaggcctgacttcggcgctcttcccccagacctgaggctcatcaacacacaggccatctttgccaagtgcactgggatgatcattctgggcgggggcgtggtcaagcaccacattgccaatgccaacctcatggtgagtgggggtggcgcttcggcccactctgcagacatgctgtgtggtgggcctatgccatgtgctgggtagacagcatgaactagacaggccaggatccctgctccccgggactgatgttctagtaggggagatagcaaacaagtgacatccacgtcagggggcagtcattgctacggggaatactaaatgatggcatgagaagagaaaggggtgctgtccaacaagaggttttggaaggaggcttctggaagtgtgagctgggagcaggggtttggggaggcatctcccaggagctatgtggttgtctcccgtgccaggagtttgtgctgctgtactagcattgagcttctggattgcaaagttcccaggagagggaacagccattgcaaaggctctggggcgcctgaagtaatccaggaacagctgggtacctggtgaggggaaggtggagtggtgagggccaggaggtgatgcagggaggtgccacagggagcctgctgggccctgtgggctgaggcggggctttggcttttgcactgagagaagtgggagaggacttgactcgggttcccatgctccccctggtggccatgtggtgaacagatggtggcaggtgagtgagaactccagtccaggacagtggtgaccatgcagggatcaggaggcaggcggtggttggatttggagggcttctgaagatagagttgctggcagctcctgccttgcagatggggcagggttgttgacacctggctgttgggtctggggaaacacagccatcgttgcccagcagctctagtgaccccagacattgacatgggccctgtctgggagcgaatgtctgtgaagggcttccttcatctgggacacacctctcagcctgtttggctacggtgtcctccctctgtgtctgtctcctgtgactggctgactgggcccaccgtgcccccgcctccccacagcggaacggggccgactacgctgtttacatcaacacagcccaggagtttgatggctctgactcaggtgcccgaccagacgaggctgtctcctggggcaagatccgggtggatgcacagcccgtcaaggtaagcgctggctgggtggggcatagggtctctgggacgatgagtgtgggtcccatggcttacccaggttcccccctacccaggtctatgctgacgcctccctggtcttccccctgcttgtggctgaaacctttgcccagaagatggatgccttcatgcatgagaagaacgaggactgagcggctgcggtcccaggaaggtcttaccccctcttctatttattaatttgcagacccagcccctcccctactttttggtcagctacgtctctagaataagatggtatctgaagtccttccatgtctgtgtctcggtccttggtcctgttggtgggtcccctggcttcagcctgctccatcctctgcctcataggcctcctctcgccagcactggacgctgcctcccatggcggtcagcaggcagggctctgttgggtggtaggccagcgactgcaccacaccggaacccacaggcagggccagagccagcgcaccctgtggagcgaggggtagggagtggttatctgtggctgggctgtaccctggtttctgaggtccctgggcaccccccatctcagtcctgcctgaagccctcagtcacctctccccgaccttcagccacctgcctctaattgcctcctagacactgcaaaattaatctacctcagactgagcccctcagtagctctgtcctaccaggtgttcaggccgcaagtcttgggagcctcttattgattttttattttttaaaatagcagagatggggtcttaccatgttgcccaggctggtctcgaactcctggcctcaagtgatcctcctgccttggcctcccaaagtgctaggactacaggtgtgagccaccatgcctggctttgggagtctttttctttttctgtttttttttgagatggagtcttgctctgtcgccaggctggagtgcagtggcgccatctgggctcactgcaacctccgactccctagttcaagcgattctcctgcctcagcctcccgagtaggtgggattacaggcacgcgctaccatgcccagctaatttttgtatttttagtacagatggggtttcaccatgttggccaggatgatctctatctcctgacctcgtgatccacccccctcggcctcccaaagtgctgggattacaggtgtgaaccaccatgcctggccgggagtctttttcttgtaccacatgttcctctatcagttattcctcttggctctgcttctagaccatgtccagagactgctgattttctgccactaccatgtttggagcatgccttgctcacagcttgcctgttccctgccaccagctgggctccatcctgtccatttggcagccccaatgatccccacttcccctggtcccaacacaatgtaaacagttcctcaagcaagccatgcttcctctttccaccttgaaaatgtcccttgatgtgcctgccctccaaggcaacttctgttctactgggcccataagaaataggtggaacattcttgctaccttagttcctaaagcaagagcttgtccgccaagtcttcagggcccccccggttccctccatcctcttatgggccttagttcccctggccaagcccagcgctgatgtctcctttgccgagattcccccggctctgaccccactacaccaggatggtctgtttctggcctgactccccaccaggctgggacatgtcaaggacagggctcagggcttgaaaccatgcacagggatgctaagatgtagctccagtttcttgaatgactgcagccctatctcacccaaggttagacatggccgtcggctcccccttgcccaggggtcagtgccagttgctcggcctggcatctgcagcccagcctgaccccggatcttgccgcacctgccgccaccctgaagcctttgtttcctgactgatgcatgcgcaggctacacctcttaacatatgctgttccctttgcctggaatgcccttcctgcctcatcttctctctagcccaagctgggcacggtgtctcaggcctgtaatcccagcactttgggaggccgaggcgggtgaatcacttgaggtcaggagtttgagaccagcctggccaacatggtgaaaccctgtctctactaaaaatacaaaaattagccaggtatggtggtaggggcctgtaatcccagctactcaggaggctgagacatgagaatcacctgaaccctggggggaagaggttgcagtgagctgagatggcgccactgcatttgcctgggcaatagtctcaaaaaaagaaaaaagggccgggtgtggtggcttacgcctgtaatcctagcacttgggaaggctgaggtgggtggatcatgaggtcaggagtttaagaccagcctgaccaacatagtgaaaccctgtctctactaaaaatacaaaaattagctgggtgtggtggcacgcacctataatcccaactactcaggagactgaggcaggagaatcgcttgaacttgggaggcggagtttacagtgagccaagattgcgccactgcactctagcctgggcgacagagcaagacttgtctcaaaaaaaaaaaaaaaaaaaaaaaaaagatcctagccttcaggccctggagtgactgaggtaaggacagggctgagatggggcaggcatctaggtatgaagtagggctgggggcacctcacctccaccaggtcccagaagaacaccttcccgtcctcagaacagctgaccacatgtgtgtcacgctcgctcaggcagcagtccagcttgtattcctggttcttatggcccttgtacctaagggtggacaggatcggggggcttggtcctctccaggggtgggagaggagggaaggggatccccacgaccacaaggactcactcgcccagcagctcccctgtgtctttgtccaggagccgcaatgtggagtccaggctggacaccagggtgcactgcccatcccggctgaagcaggtgcaggtgatggggccttgggggaagggtgggtaggtgagtgagggtggggtgcccctggttggccccccatcttccctgcctgtcccacatccccagccacactcactgcccacgtagtctgagaagagctgccccatccttaggtcatagcgtctcacgcggccatccacggagctgcaggagagggtagatccagcgggaaccttgactacactcacatggctccaggcagccctgtgccttcccagcccagtgggcctgctcttccagtgcacaggagtggaattctgaagctctggccttgagactcaggcccagggccaattacgtcctactccatcatttccaagacccacaccccctttccaagcccttggagtccttctgattcccccttttcttccttttgtttgagacagagttttgctcttgttgctcaggctggagtgcaatggcatgatcttggctcaccggaacctctgcctcccgggttcaagagattctccttcctcagcctcccgagtagatgggaatacaggcatgcaccaccacgccctgctaattttgtatttttagtagagacggggtttctccatgttggtcaggctggtctcgaactcccaacctcaggtgatccgcccacctcagcctcccaaagtgctgggattacaggtgtgagccaccccacctggcccaattcccccttttcctgcattctccagctcctcctcctcagtactcagtcccaccactttccccactacccagcaccagcatctagactgttctggtctccctgcaccccccacagccaccagagggagcacttttcaaagtacagttgacccatgaacaacacggtttgaactgaacgcgtccacttatatgtggattttcttctgcctctatcagctgtgagacaccaagatcaatccctcctcttcctcctcctctgctttctcaacacgaagatctttatgacgatctcttcacttccacttaatgaatagaaaatatattttttccaccaggcgcggtggctcacgcctgtgattccagctctttgggaggccagggcaggtggatcacgaggtcaagagatggagaccctcctggccaacatggcgaaaccccgtctctactaaaaatacaaaaattagctgggcgtggtggcacgcgactgtagtcccagctactagggaggctgaggcaggagaatcgcctgaacctagaagttagaggttgcagtgagccgagatcacgtcactgcactccagcctggcaacagagcgagactgcgtctcaaaaaaaacaaaaattcttccttatgattatttttatgtatttatttatttaatttatttacttattttgagacggagtcttgctctatcgcccaggagtgtagtggtgcgatgtcggctcacagcaagctctgcctcctgggttcactccattctcctgcctcagcctcctgagtagctgggactacaggcgcctgccactatgcccggctaattttttgtatttttagtagagacggggtttcaccgtgttagccagaatgatctcgatctcctgacctcatgatccgcctgcctctgcctcccaaagtgctgggattacaggcatgagccacagcgcccggcctatttttatttatttttagaaatcattttatctttttttttttgagatggagtctcactttgtcgcccaggctggagtgcagtggcacaatctcggctcactgcaacctccaactcccgggttcaggcgattctcctgcctccgcctcccgagtggctgggattacaggctcccgtcaccacacctggctaatttttgcatttttagtagagacggggtttcaccatgttggccaggctgatctcaacctcctgacctcaagtgatctgcccaccttggcctcccaaagtgctgggattacaggtgtgagccaccgtgcccggccagattattattattttgtagacagtctgtctttcacccagcatggagtgcaatggtgcctcgaactcttggactcaagtgatccttccacttcagcctcccaagtagctgggattacagctgtgtgccactgtgcccagctgagagtaggttttaatctgagcatgggggcagctatgattccccgtagcacctggggtgagaccaggtcctggctccactcaccctgccaggatctcgtggtctgacaccttcacactggacacgccatctctggcctcatccagcgtctgcactggctcaggcctccgtgagcggcaatcccaacagcggatactggaatcaatagagcctgtgaggccagcatgatggtgaggtcaggtttggagggggagggcagcaccctgggcccccgtgcttaggccccagactcaccggacaggataactgtggcctcttcattaaactgcaccgtgttcaccttctgagaaagttattgccactcagaggaggctggactttggaggactgggataaaggcagggttcccagtgtcggttaaagcaagggcgaaggggaggtgaaaggttttgggggaacagcaaggacaggggttggtgactgcctagcctggcatgcggagtgggggatcgtcatctggggaagggatccttacggtgtaatgggggtggccgtgtcaccacctatgcgctaatacgggtcccctccactcaaatgagggtctccaggctttcactcacccctgcgtggccccggaatttgcgcacgacctgccctgatgccacatcccacagaaccaccgccttgtccccgccgccggagcagagactactgttgtcaaaggagctggagtaaaggaggaggaggatcagcatcgacctcggatcccagcctcagcgctcccatcccagcctggtccccggctcacccggccgcatccagcacctcgtagccgtggccgctgtacgtccgcagcagcgtcccccgaagcgggttccacagcttcagcgtcttgtcactgccgcacgtcaggcagtaattgccatccactggggaacaccaggcgggggttactgggccgtcgatctcaggaggcgggaggaggacccggaatgaagacgaaggcgctcaccattaaatcgtacggctcgcactgccccctgcccgcagtccagcgtcttcaaccgtttctgcggcagctctggaggccgcggctttggctcagggaaagccatgctcccaggactccttccttgcagccttaaatcggtctgtacggaaaattccgcgccttagaaacccacgcttgggtgtaaccttattattgttcttcctgacctacttcctgtttatcacttccgggttcatcattttggcatttcggtgatcgggttggaactattgaagcccgctttcaggttcttttccccattttccctttgaaaggaagacttctggcttctcctaaatctccgttctctgggtaaggggagtccaagcctctgtcatgaggaacggaaatgcgagggcctcgggtgttactctaaaatccgccctcagcttgcacgccggaagctgcgattcctgcagcggaagaggcgtgatctggccttcgactcgctatgtccactaacaatatgtcggacccacggaggccgaacaaagtgctgaggtgaggaccccagcgtcgtgggcacgggttcgggttgtgggtgtggatcggggccctgggaagcgcctgtctatcccgggggcaggacctgagcgcccctgaccctcgagcctgtcgcaggtacaagcccccgccgagcgaatgtaacccggccttggacgacccgacgccggactacatgaacctgctgggcatgatcttcagcatgtgcggcctcatgcttaaggtgggcggggttgagcttctatgggtgtagttggacctgagaacgaggcccgggggcgggtttggaatgaagcggggtgtcttgtcattgctgatggggcgggacctgagatcggccgggagtggggctgcgatgacgctgggccgagaaagccccagtctttggtgaagtcaaggattcgagtcaggttggggatgtggcagattggtctgcgagtggggccaggctttgaagcaacttggagaggagttgtggaaaaagggcagggtcttaagcatgtgggatgtcagagtctctcttggtcctgagagacgcaggccagacagtaggactagaaaccacgtatctagagtatgccatgagcaggtgggactgaggaattccgggtggggcaaggtcccagctgcatcagatggaatcagtgggcatgatctggtgtctggaaaggtggcttcggggactcattgttgtgcctttcactaacctgcccacccacttacctttccctagctgaagtggtgtgcttgggtcgctgtctactgctccttcatcagctttgccaactctcggagctcggaggacacgaagcaaatgatgagtagcttcatgtgagacttgccctacagaacaagtgactcttgagtaaggggtggggggaccccagcctggccatcctagactgacacctctctcctgtctcaggctgtccatctctgccgtggtgatgtcctatctgcagaatcctcagcccatgacgcccccatggtgataccagcctagaagggtcacattttggaccctgtctatccactaggcctgggctttggctgctaaacctgctgccttcagctgccatcctggacttccctgaatgaggccgtctcggtgcccccagctggatagagggaacctggccctttcctagggaacaccctaggcttacccctcctgcctcccttcccctgcctgctgctgggggagatgctgtccatgtttctaggggtattcatttgctttctcgttgaaacctgttgttaataaagtttttcactctggctgtcagcctcttctgttcagtggggtgttcctcctacctggcgggaagggctctagccccataggcctggtgtggggccccagtctggaggcttctggctgttcatttgcttacttcataaaccttgtgtcttaagtcaggtgctagggacaagacagtgacttctgccctctggcaactcaccagatggccctgctgacctagataatctaggctttggtttccttttttttttttcctttttaagaaagaaaatggtcttgatctgtcatgcaggctgagtgcagtggcacaatctatgttcactgcagcctcaaactcctgggctcaagcaatcctcccacctcagcctgccacgtaactgggaccacaaatgcgtgctaccatgcccagttaattcttgttttttttgagacagagttttgctcttgttgcccaggctggagggcaatggcatgatcttgatctcggctcactgcaacctccgcctcccaggttcaagtgattctcctgcctcagtctcccaagtagctgggattacaggcatgtgccaccatgcccagctaatttttgtatttttacattttgtgtaaaattacaaattttgtgttttcaaacccgtctctacaaaacaacccatgttgcccaggctggtctcaaactcccaggcccaagtgattcaccagcctggccctcccaaagtgctgggattgcaggcttgagccactgcgcctgccctgggctttgttttcttatcagagaatgaactggtaggaattgggaaaggcatgaaagactcggggtccttccccacttgtcagaccctcttttctctccggaacacccagggatccttctcaaccaggctggatcccatccctggtactccaggggtatttacccaacgtcccaatccccacagtataggactcttcatcagatcctcctcttaggcaagctaggtccttccaggaccctagcgctgaaggtccatgggacggacaccctggattcccatggacacactacaccggctaggaaaacccggcccccttaggaaaagcacttctgctcctaccggcattaagaggcattccgtcttggaattccggcattaagaggcattccgtcttcatagcccgtgagacgccagtgtcacctttagcccaaccagtgccctgagggtggcattttcctaccttcctgtaacgacccccgggattgcccagggctacagcctctctcccgtgagcctccagaccgcgccctggccccgcc

SEQ ID NO: 802 - DNA, 15090 bp, Homo sapiens
acgttccctacttcctgtgctcttgcggagacgcgcgcgtcggggtttaacgcgtttctgggccgccgtaagcccggcctaggggcagctttgactcgagagccggctataggcgcatggaaggttccctggaacgggaggcgccagcgggggcgctggccgccgtgctaaagcacagctcgacgttgccgcccgaaagcacccaggtccggggctacgacttcaaccgcggtgtgaattaccgcgcactgctggaggccttcggcaccaccggcttccaagcaaccaacttcgggcgcgctgtacagcaagtcaatgccatggtgaggaccgggcggaatttctagggacgcggaggggcgtggcttgtagaaccaacgcggtactagacgggggcagcgtttccagtggaggggatatgtcttttatttgagttgcccaatagttggaggaaggcgggacctattctgggcgggagtttctgtcctgggaaggggattttgcactctggtagttacatgctggtacggtaacctgaggaggcgaggactgattcttggtgtgggggcgggttctaggtacatttaaagctttctggaatgggcggagcctggggcaagacaaattaagggaggatatgggaggaggagcctaagtctgggcggttcttgaatttagatttgcttttcccagcggggaagggaccggatctgaaaggagatgctctctgattcctaaaagggtgggggctggctgggcgcggtggcgcatgcctataatcccagcattttgggaagccgaggcgggtggatcaagagaagaggagttcgagacaagcctggccaacatggtgaaaccctgtctctactaaaatgcaaaaaattagccgggcatggtgttgcgcgcctgtagtcccagctactcgggaggctgaggcaggagaatcgcttgaacccgcgaggtggaggttgcagtgagctgagattgcgccactgcactccagcctggtgacagagcgatactctgtctcaaaaaaaaaaaaaaaaaaaggccgggcacggtggctcatgcctgtaatctcagcattttgggaggccgaggcgggcggatcacctgaggtcgggagttcgagaccagcctgaccaacatggagaaaccccgtctctactaaaatgcaaaaaattagccgggcatggtggtgcgcgcctgtagtcccagctactcgggaggctgaggcaggagaatcgcttgaacccgggaggtggagcttgcagtgagccgagatcgcgccattgcactctagcctgggtaacaagagtgaaactccgtccaaaaaaaaaaaaaaaagggtgggggcaaatcctgaacgtgtgtcttgagatctggtctgggaaggggcagagtttacacaggagatgttccttggtcccctgtagaactggtcctgtatccctgaatgtgcagggcctggggtgaaatctgtttctggagcccacctggagtcctgagtctgggatttaaggccagtgcttaacttgacttggcccttactcacagatcgagaagaagctggaaccactgtcacaggatgaagaccagcacgcggacctgacccagagccgccgcccacttaccagctgcaccattttcctgggatatacatccaacctcatcagttcaggcatccgtgagaccattcgctaccttgtgcagcacaacatggtggggacctggtgaggccgtggccttggcctctgggtcaatgggcaatgcagttattgatcgtttaagtgagatgggcagataggggtctgttataagcagaggaatagaatcaagttttgttttgtagcagagctccctcataagagtcactggacaaggatgaggttagaagttctgcccagaatgagggcaggggcttccttcttgggccaaattcactgccttgtggctgcaggtggacgtattggtgaccacagctggcggcgtggaggaagacctcatcaagtgcctggcgcccacatacttgggcgagtttagcctcagggggaaggagctccgggagaacgggatcaataggtgagaaccctgagtggtgttgggcaggggagctggaccaagggtcctggggcctgatgcctacatgcctcctgttctcaggatcggaaacctgctggtgcccaatgagaattactgcaagtttgaggactggctgatgcccattctggaccagatggtgatggagcagaacacagaggtggggctggggcaacctggaggggccagttcagtgggagtcaggggaggcatggcctgaaggtcacatcctctcctagggtgtaaagtggacgccttctaagatgatcgcccggctgggcaaggagatcaacaacccagagtccgtgtattactgggcccagaaggtgaggacctaagcgggagcaaagtagccagactttggcatgtgttaacttatttcatctttccagcctcctggggattcagtactgttattctcagcatcctcactcttagatgaggagactcaaacacagataggcgtggtaattttttttttttttgagacaggatcttgctctgtcacctaggctggagtgcagtggtgtgatcacagctcattgcagcctcaacctcctggggccaagcagtcctcccacctcagcctctcgagtagctgggaccacaggcacatgccatcatgcccagctaattttaaaaattttttgtagagatgggggtctccctgtgtttcccaggctggtcttgaactcctggcgtcaggcagtcctcccaccttggcctcccaaagtgctgggattacaggcgtgagccactgtgcccagccaggctaggtaattttgtctgaagtcacacagataactagtggggcctcagcatccttatgctcctcccagactatctctggaacagtagaggcaacacttagcaactctcctggggcctggctcagggtcccacactcccagatgctataaaataagagctacccactccctttaattagagaatcagaacctgaaaaaaaaaaaaaaaaagctacatagtctttttttttttttttttttttttgagacagagtcttgctctgtcgcccaggctggagtgtaatggtgtgatttcagctcactgcaccctccacctcccaggttcaagtgattctcccgcctcaccctcctgagtagctgggactataggcacccaccatcatgcccggccaatttttgtatttttctacagatggggtttcaccatgttggccaggctggtcttgaactcctgacctcaagtgatccacccgccttggcctcccaaagtgctgggattacaggggtgagccaccacacccagcctacttactctttcttttttacgagacagggtctcattctgtttcccaggctggagtgcaatggcacaataatggctcactgctgtcttgagcttctgggctcagtcgattctcctgcctcagcctgctgagtagctgggactacaggtgcgtgccaccatgcctggctaattgtttttgtagagatgggaactcaccatgttgcacaagctggctctttttttttttttgagacggagttttgctcttgttacccaggccagagtccaatggcgcaatcttggctcacagcaacctctacctcctgggttcaagcaattctcctgcctcagcatcaagttcccaagtagctgggattataggcatgtgccaccacccctggctaattttgtatttttagtagaggcagggtttctccatgttggtcaggctggtgtcgagctcctgacctcaggtgatccacccgcctcggcctcccaaagtgctgggattacaagcgtgagccaccgcgcccggccacaagctggctctttaaaaaagaattagacggccgggcatggtggctcatgcttgtaatcccagtactttgggggctgaggcgggtggatcacctgaagtcaggagttcaagaccagcctggccaacatggtggaaccctgtctctactaaaaaaacaaaatgcaaaattagctgggcatagtggcatgcgcctgtaatcctagctactcgggaggctgaagcaggagaatcactggaacccaggaggcagaggttgcagtgagctgagatagtgccattgcactccagcctgggcaacgagtgaaactccgtctcagggaataaaaaaaaagagagagaaacagctcagcaagctaagaataggctggttctttatgtgccaggcactatactaagtgttttctgtgggttttctcatataggcctcatctgtgagaggtgtttctgttatgcttataattgaggaaacagtcctagagaaattaggcaccccatccacagtcagatagtcatatagccagcatggagacgaggctctgagctccagccactgtcctgtcatgttctctgcagaaccacatccctgtgtttagtcccgcacttacagacggctcgctgggcgacatgatcttcttccattcctacaagaacccgggcctggtcctggacatcgttgagggtgaggcgctagggccacagaggagaggggaaggagggctggctgagtccaaggcctgacttcggcgctcttcccccagacctgaggctcatcaacacacaggccatctttgccaagtgcactgggatgatcattctgggcgggggcgtggtcaagcaccacattgccaatgccaacctcatggtgagtgggggtggcgcttcggcccactctgcagacatgctgtgtggtgggcctatgccatgtgctgggtagacagcatgaactagacaggccaggatccctgctccccgggactgatgttctagtaggggagatagcaaacaagtgacatccacgtcagggggcagtcattgctacggggaatactaaatgatggcatgagaagagaaaggggtgctgtccaacaagaggttttggaaggaggcttctggaagtgtgagctgggagcaggggtttggggaggcatctcccaggagctatgtggttgtctcccgtgccaggagtttgtgctgctgtactagcattgagcttctggattgcaaagttcccaggagagggaacagccattgcaaaggctctggggcgcctgaagtaatccaggaacagctgggtacctggtgaggggaaggtggagtggtgagggccaggaggtgatgcagggaggtgccacagggagcctgctgggccctgtgggctgaggcggggctttggcttttgcactgagagaagtgggagaggacttgactcgggttcccatgctccccctggtggccatgtggtgaacagatggtggcaggtgagtgagaactccagtccaggacagtggtgaccatgcagggatcaggaggcaggcggtggttggatttggagggcttctgaagatagagttgctggcagctcctgccttgcagatggggcagggttgttgacacctggctgttgggtctggggaaacacagccatcgttgcccagcagctctagtgaccccagacattgacatgggccctgtctgggagcgaatgtctgtgaagggcttccttcatctgggacacacctctcagcctgtttggctacggtgtcctccctctgtgtctgtctcctgtgactggctgactgggcccaccgtgcccccgcctccccacagcggaacggggccgactacgctgtttacatcaacacagcccaggagtttgatggctctgactcaggtgcccgaccagacgaggctgtctcctggggcaagatccgggtggatgcacagcccgtcaaggtaagcgctggctgggtggggcatagggtctctgggacgatgagtgtgggtcccatggcttacccaggttcccccctacccaggtctatgctgacgcctccctggtcttccccctgcttgtggctgaaacctttgcccagaagatggatgccttcatgcatgagaagaacgaggactgagcggctgcggtcccaggaaggtcttaccccctcttctatttattaatttgcagacccagcccctcccctactttttggtcagctacgtctctagaataagatggtatctgaagtccttccatgtctgtgtctcggtccttggtcctgttggtgggtcccctggcttcagcctgctccatcctctgcctcataggcctcctctcgccagcactggacgctgcctcccatggcggtcagcaggcagggctctgttgggtggtaggccagcgactgcaccacaccggaacccacaggcagggccagagccagcgcaccctgtggagcgaggggtagggagtggttatctgtggctgggctgtaccctggtttctgaggtccctgggcaccccccatctcagtcctgcctgaagccctcagtcacctctccccgaccttcagccacctgcctctaattgcctcctagacactgcaaaattaatctacctcagactgagcccctcagtagctctgtcctaccaggtgttcaggccgcaagtcttgggagcctcttattgattttttattttttaaaatagcagagatggggtcttaccatgttgcccaggctggtctcgaactcctggcctcaagtgatcctcctgccttggcctcccaaagtgctaggactacaggtgtgagccaccatgcctggctttgggagtctttttctttttctgtttttttttgagatggagtcttgctctgtcgccaggctggagtgcagtggcgccatctgggctcactgcaacctccgactccctagttcaagcgattctcctgcctcagcctcccgagtaggtgggattacaggcacgcgctaccatgcccagctaatttttgtatttttagtacagatggggtttcaccatgttggccaggatgatctctatctcctgacctcgtgatccacccccctcggcctcccaaagtgctgggattacaggtgtgaaccaccatgcctggccgggagtctttttcttgtaccacatgttcctctatcagttattcctcttggctctgcttctagaccatgtccagagactgctgattttctgccactaccatgtttggagcatgccttgctcacagcttgcctgttccctgccaccagctgggctccatcctgtccatttggcagccccaatgatccccacttcccctggtcccaacacaatgtaaacagttcctcaagcaagccatgcttcctctttccaccttgaaaatgtcccttgatgtgcctgccctccaaggcaacttctgttctactgggcccataagaaataggtggaacattcttgctaccttagttcctaaagcaagagcttgtccgccaagtcttcagggcccccccggttccctccatcctcttatgggccttagttcccctggccaagcccagcgctgatgtctcctttgccgagattcccccggctctgaccccactacaccaggatggtctgtttctggcctgactccccaccaggctgggacatgtcaaggacagggctcagggcttgaaaccatgcacagggatgctaagatgtagctccagtttcttgaatgactgcagccctatctcacccaaggttagacatggccgtcggctcccccttgcccaggggtcagtgccagttgctcggcctggcatctgcagcccagcctgaccccggatcttgccgcacctgccgccaccctgaagcctttgtttcctgactgatgcatgcgcaggctacacctcttaacatatgctgttccctttgcctggaatgcccttcctgcctcatcttctctctagcccaagctgggcacggtgtctcaggcctgtaatcccagcactttgggaggccgaggcgggtgaatcacttgaggtcaggagtttgagaccagcctggccaacatggtgaaaccctgtctctactaaaaatacaaaaattagccaggtatggtggtaggggcctgtaatcccagctactcaggaggctgagacatgagaatcacctgaaccctggggggaagaggttgcagtgagctgagatggcgccactgcatttgcctgggcaatagtctcaaaaaaagaaaaaagggccgggtgtggtggcttacgcctgtaatcctagcacttgggaaggctgaggtgggtggatcatgaggtcaggagtttaagaccagcctgaccaacatagtgaaaccctgtctctactaaaaatacaaaaattagctgggtgtggtggcacgcacctataatcccaactactcaggagactgaggcaggagaatcgcttgaacttgggaggcggagtttacagtgagccaagattgcgccactgcactctagcctgggcgacagagcaagacttgtctcaaaaaaaaaaaaaaaaaaaaaaaaaagatcctagccttcaggccctggagtgactgaggtaaggacagggctgagatggggcaggcatctaggtatgaagtagggctgggggcacctcacctccaccaggtcccagaagaacaccttcccgtcctcagaacagctgaccacatgtgtgtcacgctcgctcaggcagcagtccagcttgtattcctggttcttatggcccttgtacctaagggtggacaggatcggggggcttggtcctctccaggggtgggagaggagggaaggggatccccacgaccacaaggactcactcgcccagcagctcccctgtgtctttgtccaggagccgcaatgtggagtccaggctggacaccagggtgcactgcccatcccggctgaagcaggtgcaggtgatggggccttgggggaagggtgggtaggtgagtgagggtggggtgcccctggttggccccccatcttccctgcctgtcccacatccccagccacactcactgcccacgtagtctgagaagagctgccccatccttaggtcatagcgtctcacgcggccatccacggagctgcaggagagggtagatccagcgggaaccttgactacactcacatggctccaggcagccctgtgccttcccagcccagtgggcctgctcttccagtgcacaggagtggaattctgaagctctggccttgagactcaggcccagggccaattacgtcctactccatcatttccaagacccacaccccctttccaagcccttggagtccttctgattcccccttttcttccttttgtttgagacagagttttgctcttgttgctcaggctggagtgcaatggcatgatcttggctcaccggaacctctgcctcccgggttcaagagattctccttcctcagcctcccgagtagatgggaatacaggcatgcaccaccacgccctgctaattttgtatttttagtagagacggggtttctccatgttggtcaggctggtctcgaactcccaacctcaggtgatccgcccacctcagcctcccaaagtgctgggattacaggtgtgagccaccccacctggcccaattcccccttttcctgcattctccagctcctcctcctcagtactcagtcccaccactttccccactacccagcaccagcatctagactgttctggtctccctgcaccccccacagccaccagagggagcacttttcaaagtacagttgacccatgaacaacacggtttgaactgaacgcgtccacttatatgtggattttcttctgcctctatcagctgtgagacaccaagatcaatccctcctcttcctcctcctctgctttctcaacacgaagatctttatgacgatctcttcacttccacttaatgaatagaaaatatattttttccaccaggcgcggtggctcacgcctgtgattccagctctttgggaggccagggcaggtggatcacgaggtcaagagatggagaccctcctggccaacatggcgaaaccccgtctctactaaaaatacaaaaattagctgggcgtggtggcacgcgactgtagtcccagctactagggaggctgaggcaggagaatcgcctgaacctagaagttagaggttgcagtgagccgagatcacgtcactgcactccagcctggcaacagagcgagactgcgtctcaaaaaaaacaaaaattcttccttatgattatttttatgtatttatttatttaatttatttacttattttgagacggagtcttgctctatcgcccaggagtgtagtggtgcgatgtcggctcacagcaagctctgcctcctgggttcactccattctcctgcctcagcctcctgagtagctgggactacaggcgcctgccactatgcccggctaattttttgtatttttagtagagacggggtttcaccgtgttagccagaatgatctcgatctcctgacctcatgatccgcctgcctctgcctcccaaagtgctgggattacaggcatgagccacagcgcccggcctatttttatttatttttagaaatcattttatctttttttttttgagatggagtctcactttgtcgcccaggctggagtgcagtggcacaatctcggctcactgcaacctccaactcccgggttcaggcgattctcctgcctccgcctcccgagtggctgggattacaggctcccgtcaccacacctggctaatttttgcatttttagtagagacggggtttcaccatgttggccaggctgatctcaacctcctgacctcaagtgatctgcccaccttggcctcccaaagtgctgggattacaggtgtgagccaccgtgcccggccagattattattattttgtagacagtctgtctttcacccagcatggagtgcaatggtgcctcgaactcttggactcaagtgatccttccacttcagcctcccaagtagctgggattacagctgtgtgccactgtgcccagctgagagtaggttttaatctgagcatgggggcagctatgattccccgtagcacctggggtgagaccaggtcctggctccactcaccctgccaggatctcgtggtctgacaccttcacactggacacgccatctctggcctcatccagcgtctgcactggctcaggcctccgtgagcggcaatcccaacagcggatactggaatcaatagagcctgtgaggccagcatgatggtgaggtcaggtttggagggggagggcagcaccctgggcccccgtgcttaggccccagactcaccggacaggataactgtggcctcttcattaaactgcaccgtgttcaccttctgagaaagttattgccactcagaggaggctggactttggaggactgggataaaggcagggttcccagtgtcggttaaagcaagggcgaaggggaggtgaaaggttttgggggaacagcaaggacaggggttggtgactgcctagcctggcatgcggagtgggggatcgtcatctggggaagggatccttacggtgtaatgggggtggccgtgtcaccacctatgcgctaatacgggtcccctccactcaaatgagggtctccaggctttcactcacccctgcgtggccccggaatttgcgcacgacctgccctgatgccacatcccacagaaccaccgccttgtccccgccgccggagcagagactactgttgtcaaaggagctggagtaaaggaggaggaggatcagcatcgacctcggatcccagcctcagcgctcccatcccagcctggtccccggctcacccggccgcatccagcacctcgtagccgtggccgctgtacgtccgcagcagcgtcccccgaagcgggttccacagcttcagcgtcttgtcactgccgcacgtcaggcagtaattgccatccactggggaacaccaggcgggggttactgggccgtcgatctcaggaggcgggaggaggacccggaatgaagacgaaggcgctcaccattaaatcgtacggctcgcactgccccctgcccgcagtccagcgtcttcaaccgtttctgcggcagctctggaggccgcggctttggctcagggaaagccatgctcccaggactccttccttgcagccttaaatcggtctgtacggaaaattccgcgccttagaaacccacgcttgggtgtaaccttattattgttcttcctgacctacttcctgtttatcacttccgggttcatcattttggcatttcggtgatcgggttggaactattgaagcccgctttcaggttcttttccccattttccctttgaaaggaagacttctggcttctcctaaatctccgttctctgggtaaggggagtccaagcctctgtcatgaggaacggaaatgcgagggcctcgggtgttactctaaaatccgccctcagcttgcacgccggaagctgcgattcctgcagcggaagaggcgtgatctggccttcgactcgctatgtccactaacaatatgtcggacccacggaggccgaacaaagtgctgaggtgaggaccccagcgtcgtgggcacgggttcgggttgtgggtgtggatcggggccctgggaagcgcctgtctatcccgggggcaggacctgagcgcccctgaccctcgagcctgtcgcaggtacaagcccccgccgagcgaatgtaacccggccttggacgacccgacgccggactacatgaacctgctgggcatgatcttcagcatgtgcggcctcatgcttaaggtgggcggggttgagcttctatgggtgtagttggacctgagaacgaggcccgggggcgggtttggaatgaagcggggtgtcttgtcattgctgatggggcgggacctgagatcggccgggagtggggctgcgatgacgctgggccgagaaagccccagtctttggtgaagtcaaggattcgagtcaggttggggatgtggcagattggtctgcgagtggggccaggctttgaagcaacttggagaggagttgtggaaaaagggcagggtcttaagcatgtgggatgtcagagtctctcttggtcctgagagacgcaggccagacagtaggactagaaaccacgtatctagagtatgccatgagcaggtgggactgaggaattccgggtggggcaaggtcccagctgcatcagatggaatcagtgggcatgatctggtgtctggaaaggtggcttcggggactcattgttgtgcctttcactaacctgcccacccacttacctttccctagctgaagtggtgtgcttgggtcgctgtctactgctccttcatcagctttgccaactctcggagctcggaggacacgaagcaaatgatgagtagcttcatgtgagacttgccctacagaacaagtgactcttgagtaaggggtggggggaccccagcctggccatcctagactgacacctctctcctgtctcaggctgtccatctctgccgtggtgatgtcctatctgcagaatcctcagcccatgacgcccccatggtgataccagcctagaagggtcacattttggaccctgtctatccactaggcctgggctttggctgctaaacctgctgccttcagctgccatcctggacttccctgaatgaggccgtctcggtgcccccagctggatagagggaacctggccctttcctagggaacaccctaggcttacccctcctgcctcccttcccctgcctgctgctgggggagatgctgtccatgtttctaggggtattcatttgctttctcgttgaaacctgttgttaataaagtttttcactctggctgtcagcctcttctgttcagtggggtgttcctcctacctggcgggaagggctctagccccataggcctggtgtggggccccagtctggaggcttctggctgttcatttgcttacttcataaaccttgtgtcttaagtcaggtgctagggacaagacagtgacttctgccctctggcaactcaccagatggccctgctgacctagataatctaggctttggtttccttttttttttttcctttttaagaaagaaaatggtcttgatctgtcatgcaggctgagtgcagtggcacaatctatgttcactgcagcctcaaactcctgggctcaagcaatcctcccacctcagcctgccacgtaactgggaccacaaatgcgtgctaccatgcccagttaattcttgttttttttgagacagagttttgctcttgttgcccaggctggagggcaatggcatgatcttgatctcggctcactgcaacctccgcctcccaggttcaagtgattctcctgcctcagtctcccaagtagctgggattacaggcatgtgccaccatgcccagctaatttttgtatttttacattttgtgtaaaattacaaattttgtgttttcaaacccgtctctacaaaacaacccatgttgcccaggctggtctcaaactcccaggcccaagtgattcaccagcctggccctcccaaagtgctgggattgcaggcttgagccactgcgcctgccctgggctttgttttcttatcagagaatgaactggtaggaattgggaaaggcatgaaagactcggggtccttccccacttgtcagaccctcttttctctccggaacacccagggatccttctcaaccaggctggatcccatccctggtactccaggggtatttacccaacgtcccaatccccacagtataggactcttcatcagatcctcctcttaggcaagctaggtccttccaggaccctagcgctgaaggtccatgggacggacaccctggattcccatggacacactacaccggctaggaaaacccggcccccttaggaaaagcacttctgctcctaccggcattaagaggcattccgtcttggaattccggcattaagaggcattccgtcttcatagcccgtgagacgccagtgtcacctttagcccaaccagtgccctgagggtggcattttcctaccttcctgtaacgacccccgggattgcccagggctacagcctctctcccgtgagcctccagaccgcgccctggccccgcc

SEQ ID NO: 803 - DNA, 3830 bp, Homo sapiens
ctgggcacggtggctcatgcctgtaatcccagcactttgggaggctgaggtgggcggatcacgaggtcaggagatcaagaccatcctggctaacatggtgaaaccccgtctctactaaaaatacaaaaaattagctgggcgtgtggcgggcgcctgtagtcccagctacttgggaggctgaggcaggagactggcgtgaacccgggaggtggagcttgtagtgagccgaaatcacaccactacactccagcctgggcgacagagcaagactccgtctcaaaaaaaaaaaaaaaaaaaaaaaagctctctgattttagctgttaggtgggagatgggttggaggataccaaagccagcttgcaggctatggggataaagaaaacacctggatttcggacctactttataggtagaggttggcagacatgctgagaaggatggatgtggggtgtgagaaaaggggagacagcaagctgcgctcctcatttttaatttttatttatctatttttgagacggagtttcgctctgttgcccaggctggagtgcagtggcaccatctcagctcactgcaacctccacctcccgggttcaagtgattctcctgcctcagcctcctgagtagctgggattatgggtgtgcgccaccacacccggctaatttttgtattttttagtagagacggggtttcgccatgttgtccaggctggtctctaactcctaacctcaggtgatctgccctccttggcatcccaaagtgctgggattacaggtgtgagccaccgcgcccagccccaatccctatttttcagtctagtggatgagtggagggtggggccgtttgctgagatgcagaaagatcagggataggtggagagggagctgagggggcaactttgaggtccaagcgaggatgtcaaggaggatgtctgtctcctccaacaaggtaggctcattccagcctcacggcttttgctgttctgtcttcccatgtgcaggaaatggcctctctgcatcttcacatacggggattttctcagccttctggctttggctcaaatctcacctccttggcgtccttcacccatccctccaactaaaatcccgaactcctccacctaaagactcaaattatcctgtttaaatcctgattgcgctgggcgcggtggctcacacctgtaatcccagcactttgggaggccgaggcaggcagatcacctgaggtcaggagttcgagactagcctgaccaacatagtgaaaccccatctctactaaaaatacaagaattagccgggcgtgatggctcatgcctgtaatcccagctactcgggaggctgaggcaggagaattgcttgaaactgggaggcagaggttgcgatgagtggagatcgcgccattgcactccagcctgggcaacaagagcgaaactctgtctccaaaaaaaacaaaaaacaaaaaaggcctgatagcactcaccactattgttaactttctatcttcccaatcagattgtgggctccagtagggcagggtccacatcttggtcttgttcaccactaaatccttagtgcctagcacggagcccaccatagagaatagactacatgaattgtagagtgagtgaataatcctgttggccgtatgcactgttaggagggtgtgtttgagatacagatgacacccagggtctcacattcttgcaggagggaaagagacgtcagccctgggtcccagaagaggccactgacccagtgggagttcagggaaggcttcccagaggaggtggaggtgacagctgcagctataagggaaggaagaacagagcgttatgcagcatgtgaaggctttggagacttgtgagggcacgaaccgggctcactatcccattagacaaaagtggctgaggaaggatgaaactgtgtctaactctgcctggtgaccgaaatcttgtccatgggtgacgcttaagaagtgaccctcggccgggcgcagtggctcacgcctgtaatcctggcactttgggaggccaaggcgggcgggtcacgagttcaggagatcgagaccatcctggctaacacggtgaaaccccatctctactaaaaacagaaaaaattagccgggtgtggtggcgggcacctgtagtcccagttactcgggaggctgaggcaggagaatggcatgaacctgggaggcagagcttgcagtgagccgagattgcgccactgcactccagcctgggcgacagagcgagactctgtctcaaaaaaaaaaaaaaaaaaaaaagtgaccctcataaaaaaattagctgggcacgatggtgcacactagtcggaatgctggggtgggaggatgacctgagtccgggagtcagaggttgcagtgggccgagatcgcgtcacagcactccagcctggcgacagagtgagaccctatcaaaaaatagcagcaggccaggcgcggtggctcatgcctgtaatcccagcactttgggaggctgaggcgggcggatcacgaggtcaggagatcgagactaccctggctaacacggtgaaaccccgtctctactaaaaatacaaaatattagccgggcgtggtggccggcgcctgtagtcccagttactggggaggctgaggcagaagaatggcgtgaacctgggaggcggaggttgcagtgagccgagatcgtgccactgcactccagcctgggagacagcgcaagactctagctcaaacaaacaaacaaacaaaacagcaacaacaacaacaaaaccatcctcccctcccgaggggacagaacagaaacgaatgggcgagtgccgggccaagcagtgggtctccagcaggtggcattaaaataggaattttggctggggacggtggctcacacctgtaatctcagcactttggaaagcccaggcgggcggtcacctgagggcagaaccagcctcgccaacatggtgaaatgccatctctactaaaaataaaaaattagccaggcctggtggtgggtgtctgtaatcccagcaactcgggaggctgaggcaggagaatcgcttgaaccaggggggcagaggttgcaatgagtcaagattgcaccaccgcactccagcctgcgtaacaagagcgtgtaactcttgtctcaaaaataaattaaataaataaataataaaaataaaaaagaatcttcattcatgggaagtcgagaacacatgaaaacaagtaaaggccgaagcgcagtggctcacgcctgtaatcccagcactttgggaggctgaggcgggcggataacctgaggtcggaagttcgagaccagcctgaccaacagggagaaaccccgcctctactaaaaatacaaaattagccgggcatggcggtgcatgccagtagtcccagctactcgggaggctgaggcaggagaatcgcttgaacccggaatgtggaggttgtggtgagctgagatcgggcaattgcactccagcctgggcaacaagagcgaaaccctgtatcaaaaaaaaaaaaaagaaaaaaaaaggaagaaaaggcctaaaggcgccgggcgcggtgggtcacgcctgtaatcccagcactttgggaggccgaggcgggcgaatcacgaggtcaggagatcgagaccaggtgaaaccccgtctctactaaaaatacaaaaaaattagccgggcgtggtggtgggcgcctgtagtcccagctactcgggaggctgaggcaggagaacagcgtgaacccggaaagcggagctggcagtgagctgagatcgcgccactgcactccagcctgggtgacagagcgagactccgtctcaaaaaaaaaa

SEQ ID NO: 804 - DNA, 20245 bp, Homo sapiens
gcctttccagggccggggaaccccaggaggaagctgctgagccatgggcgcctacgcgcgggcttcgggggtctgcgctcgcggctgcctggactcagcaggcccctggaccatgtcccgcgccctgcggccaccgctcccgcctctctgctttttccttttgttgctggcggctgccggtgctcgggccgggggatacgaggtgagtggggcctccgagctgaaacgtacaggaggcagagtgaaacccagaatacagtctagaggtgtgggtgggtctgtcctgtgggtgtctagtgaatggctgatgatatgacagtgtggtctgagtgcgtgctttgtgtcattgcgaggtctggctgtgcgcatctgagtataggactgtgtctgattgtacctgcctccgtgtctccgggatgcttgcctagactttgtctgcacttaactgtgggattggaggggcaggaggtggcagggggtgagcagtgtatgtgtggggggaggtgctggctgagagctgggactctggagtctgcctgaaattccagcctagctcttacacttcctgagtgtgtgacgttgggcaagtcacctatcctctctaagcctcagtgccttcatctggaaactggggataacatcaccccacctcccacggtggccgtctgctgtcggcaaatgctgaacaaacatcagctacttctattattattttcccggagtgtgaatgagagctgccctgtggggttgtgcaaagtggagttgtatctatgagcacaactatgtatgtgtgtgtcctgcctgggagggcctggcctcctctgcacataggcgagatcaggcctctctgagtcactcacctctagatcaagacttactctgcagcccccgacctcgggggttattgacaaggtatgtgtgtttggggtccctgtgcagacatgccccacagtgcagccgaacatgctgaacgtgcacctgctgcctcacacacatgatgacgtgggctggctcaaaaccgtggaccagtacttttatggaagtgagtagaggatggggactggtccctgggatccccatggtccctgtaatccctctgggtcctggacattagggtggggccagtgctaccctaatatccagggtttgggctcctctgtctaggaataacccccttggctctgctgttccctgagagccttatccctgttatccacagtcaagaatgacatccagcacgccggtgtgcagtacatcctggactcggtcatctctgccttgctggcagatcccacccgtcgcttcatttacgtggagattgccttcttctcccgttggtggcaccagcagacaaatgccacacaggaagtcgtgcgagaccttgtgcgccagggtgagcctaccccaaggaagtgaaaagaggaagcccagcccagcttctgcttctgcatctctggtttctgagatttgtcatgccacgtgcaagctgtataacatgcgtgtcgctccgcctgcctggactctccatttggagacctcctatacatcccacaaagccccacctgctgtgcatcctctgggaagcctgccatgcagggggcctctttcccatatctgggaactatggcctgggagcgacccctcttgtccttccgccagaaatgtgtacacaggcaggctttcacattcccagtatcacccaccctactcccactcctggctctgaccgctgaccctgaccttgcctgtcctggcacagggcgcctggagttcgccaatggtggctgggtgatgaacgatgaggcagccacccactacggtgccatcgtggaccagatgacacttgggctgcgctttctggaggacacatttggcaatgatgggcgaccccgtgtggcctggcacattgaccccttcggccactctcgggagcaggcctcgctgtttgcgcaggtgcgacccgggacctctcttgggcccacttcttcactcactctggctcctccctcgcccagtcaaaccccgccctctccctgcaatctcacaaggaccaggcccaggcctaggcctgttgaagccctgccccttgagtgagccgtaaagccagtggcttttgagctctggcctcagccggctatgcccagcccaggctgacccagctccggctggctccgccctctcccctaataggcccctcttggtgttctggccccacccactagctcgggtcctggctcctccctaaaccgggtggcaagtggatgcctaggctgccttaaaaacaggttcattacctgtgctcagaccccatccatcctcaggctgtggaagggggaacctcattcctggagtcaggcctgctctgcgctttgacagtgctggggaggtgaacctgggttctgatgttggacccgccctctccctgctagcccaaggtggtgagttctgaaacttccccaagcttggaaataagctggaggcctctctgtttcagccctacgtgtttttgtttttgttttttgagacagggtcttgctgtcatccaggctggagtgcagtggtgcaatcctaactcactatagcctcaatctcccggattcaagcgattctcctgtctcagcccccctagtagatgagactacaagagcgcaccactacgcctggctaatttttaaattttttgtagacagtctgcccgtgttgtgcaggctggtctcaaaaactcctgggtttaagtgatcctcctgttttggcctcccagaaggctgggatcataggcaagagccaccacatcgacctagcactgctttttaacctgtgctctgacctgcccctcccaagcagaggggagtttggtggtgagagggctgggcactaattcacactgccttttcctccctcatccccagatgggcttcgacggcttcttctttgggcgccttgattatcaagataagtgggtacggatgcagaagctggagatggagcaggtgtggcgggccagcaccagcctgaagcccccgaccgcggacctcttcactggtagggggcttggtgagggcagggccagccatggtgccacacactcagaagggccctgggcttgatatctgctctgttgtcactgtcctggaattcctatagtctgggaacaaaggccctgcatttccttttgcattgggacacaaattctgaagcccatcctgggtgggacatggccggctttgaaaccagggaaggtctgggtgatgggccaccccttgaacttggtgtgacctgcaggtgtgcttcccaatggttacaacccgccaaggaatctgtgctgggatgtgctgtgtgtcgatcagccgctggtggaggaccctcgcagccccgagtacaacgccaaggagctggtcgattacttcctaaatgtggccactgcccaggtaaccctggtgtccagaaccttcgagtccggtatatacaatacaatgagctctttccatggtacaggcatcccctaacacgttctccttatttttaatttttttgagacagtcttactctgtcacccaggctggagtgcagtggtgcgatctcggctcactgcaacctctgcctcctgggttcaaacaagcacatccagctaatttttgtatttttgcactggggtctcatcatgttgtccaggctggtctcaaactcctgagctcaagtgatctgcttgcctcggcctcccaaagtgccgggattacaggcatgagccaccgcacctggcctctatttttaacatttttatttatttattattatttttttttttttgagacagagtcttgctctgtcacccaggctggagtgcagtggcatgatctcagctcactgcaacctccgcctcccgggttcaagcgattctcctgcctcagcctcctaagaagctgggattagaggcacctgccaccacacccagctaatttttgtatttttagtagacagggtttcgtcatgttgaccaggctggtcttgacctcaggtgatctgcccgcctcaacctcccaaagtgctgggattacaggtgtgggccactgtgcctagtctatttttaacatttttattgagaattccttttttattttttttagactcactctgtcgcccaggctggagtgcagtggcacgatctcggctcactgcaacctccacctactgggtccaagcgattcttctgcctcagcctcccgagtagctgggattacaggtgcccaccaccatgctcggctaagttttatgtctttttagtagaaagggggtttcaccatattggccaggctggtctcgaactcctaaccttttgacccacagccttggcctctcaaagtgctgggattacaggcgtgagccaccgcgtccagcctttaacatttttataattaaaaaacattattttttcacagagataaggtctcaccatgtggcccaggctggtctcaaactcctgaactcaagtgatcctcctgccttggcctcccaaagtgctaggatataggtgtgagccaccatgcctggcataacacgttctccttaaaaaaatttttttttcctttctttaaaaattgatggctgggcatggtggctcacgcctataatcccagcattttgagaggccgagatgggcagatcatctgaagtcaggagttcaagaccagcatagccaaaatgacgaaaccctgtctctactaaaaatacaaaaattagtcgggtgtggtggcgcacgcctgtaatcccagctacttgggaggctaaggcaagagagtcgcttgaacctggcaggtggaggttgcagtgagccgagatcacgtcacttcactctagcttgggcagcagagtgaaactctgtctcaaaaaaaaaattgttttagattaattttttttttttttcttgagacagggtcttgctgtgtggcccaggttggtcttaaactcctagactcaagcgatcctcctgcctcagtctcctgagtagctgggattacaggtgtgagcccctgtaatcatgttctcatgccccctggaggaagatgctattctattcaccatcacaatgtccccctcctggatttatgtgcattcctcattagaagagatagcataggctgggcaagagatagcatggcatggtgactggatgccctcttctaggtagtgggtccaagagaactgctcaacaactggtggctacttttatctgtgtccccacgctcccaagtgccatacccccacccatgcctgtgcacccaacatccttgaccccatatacatcaaaacacagctatacacagggatggcccaggatcctctggcttcaggactcccctcttgcctgcagggccggtattaccgcaccaaccacactgtgatgaccatgggctcggacttccaatatgagaatgccaacatgtggttcaagaaccttgacaagctcatccggctggtaaatgcgcaggtcagtgcgcctaccctgtggtacccttgtgcacatgtgcgcttgcatccgggggccttgggttatgtgcatagctctcagtgctgtctttgttttctattgttctattgtggtcattctataacaaatgaccacacacttagcagctcaaaacaacagaaatacattgtcttacagttctgtaggtaagaagtccagcatgaggccgggcgcaatggctcatgcctgtaatcccagcatgttgggaggctgagccgggcagatcacgaggtcaggaattcgagaccagcctgaccaacatggtgaaacgctgtctctactaaaaatacagaaattagctgggtgtgatggtgcgtgcctgtaatcccagctactcgggagcctgaggcaggggaatctcttgaatccgggaggcggaggttgcagtgagcggagattgtaccactgcactccagcctgggccacagagaaagactctgtctcaaaaaaaaaaaaaaaaaaaaaaaatccagcctgagtctcaccaggctataatcaaggtgttggcaaggctgtgttccttctgcagtctctaggagagaatataatttccttgctttttccaacatctagaagttacccacattcaaaatctattcttggctccatcttcaaagccagccacatagcatctttctgaccctgtttctgtaatcacatccctttctctcattctcacctcttctgcctctctcttccacattttatttatttacttagagacggagtctcgctctgtcgcccaggctggagtgcagtggcgtgctctcggctcactgcaacctccgcctcctgggttcaagtgattcttctgtctcagcctcccaagtagctgggactacagtcgcgtgccaccacgcccagctaatttttgtatttttagtagacagggtttcaccatgttggccaggatggtctcgatttcttgacctcgtgatccaccccgctcggcctcccaaggtgctgggattacagatgtgagccactgtgtggcctaatttccctactttaagtttggctgatgaacaacctcaattccatctgcaaccttaattccccttttgccatgtaatctaatgtggtaataggttctggggatcaggacatggacacttttgggcagttatcattttacccaacacagatgtgttagtgttttgcactaagtggcctgtggctgtggctgtgtgcacagtcagtcactctcatcagcacagaaacttgtctcccctctcccatctcagacaccccttcccatcaatcttgtcctcactacggtgcaatctccattcccaccttccactcgctcccagcactgctatttcaccaaaacagctcttttatgtcatttatttttatttattttttctttttaaaattttatttatttatttatttattgagacaagagtcttgctttgtcacccaggctggagtgcagtggcatgatcttgcctcatggcaacctctgcctcctgggttctagtgattctcctgcctcagcctcccaagtagctgggactacaggcatgtgccaccaaccctggctaatttttgtatttttagtagaggcagggtttcactatgttggccaggctggtctcaaaactcctgacctcaggtgatccgtccgccttggcctcccaaagtgttgggattgtaatctgaggtgggcggatcacttgaagacaggagttggagaccagcctggccaacatggtgaaaccttgtctctactaaaaatactacaaattaggtgggcgtgatggcactcatctgtaagaccagctactcggcaggctgaggcaggagaatcgctggaacctgggaggcggagtttgcagccagctgagatcgtgccactgcactccagcttgggcgacagagtcagactcagtctcaaaaaaaaaaaaaaaaaaaaaagtttattgagcacctactgtgtacattgggggacacagctcgtgcaaaacaaacatccttttcctcacataggtcactttcttgttcctccaccttgctcaggtgaaagtgcacctccattcattataaaaattgtgtctaggccgggcacggtggctcatgcctgtaatcccagcactttgggaggctgaggcgggcggatcatgaggtcaggagatcgagaccatcctggctaacacggtgaaactccgtctctactaaaaaatgcaaaaaattagccgggtgtggtggcgggcacctgtagtcccaggtactcatgaggctgaggctggagaatggcgtgaacccaagaggtggagcttgcagtgagctgagattgagccactgcactacagcctgggcaacaaagtaagactccgtcccaaaaaaaaaaagttgtgttttttggtaacaatctgacagtcctgcaaaacgattattcctgccctataatgtcacacttagtttttccacaaaagtttttaataataaagttggaattattgtaaaagtttagtaaaatttcaggtttattcttgcatctctgaaatccttttaaaaaaggctagtggtcatgtttgacttcagccaaaattcattttcacacccaaccattggcttgcacgccaaatatgtatttagagaaactgaacctatgggatgcatgaatgtgcacacatgtgtggaagtgtgggcccccaggaaggtgcggactcccgagggctcactccgtcgcctcccccagcagcaggcaaaaggaagcagtgtccatgttctctactccacccccgcttgttacctctgggagctgaacaaggccaacctcacctggtatttggggaaactggggagcttgggggggttggcatgccccgtgggtcatgaccctgccctcaatgcccctgccgctgtaggtcagtgaaacatgacgacttcttcccttacgcggatggcccccaccagttctggaccggttacttttccagtcggccggccctcaaacgctacgagcgcctcagctacaacttcctgcaggtgggtaggagccgggctagagggggcatgcagccccgaggcccgacaggctgggcgccccaacatacccctctgcctccaggtgtgcaaccagctggaggcgctggtgggcctggcggccaacgtgggaccctatggctccggagacagtgcacccctcagtaagtgtcgggcccaagaggggaagaggtttgcggctgaagttggaaaccacccctaggccgcccccctcgagtttcttctttttttttttttttttttttttttttgagacggagtctcgatttgtctcccaggctggagtgcagtggtgcgatctcggctcactgcaagctccacctcccgtgttcacgccattctcctgactcagcctcccgagtagctgggactacaggcgcccaccaccacgcccggctaattttttgtatttttagtagagacggggtttcaccatgttagccaggatggtctcgatctgacctcgtgatccgcccgcctcggtctctcaaagtgctgggattacaggcgtgagccaccgcccccagccgtcctcgagttccttcttaaagcctctaagaatcctgcccgccagcaccggacctttcgcttccccttggggtctcagctgagtcccacagaacctcaccggactcattgtctatgagcagatgaggcgatggctgtgctccagcatcacgacgccgtcagcggcacctcccgccagcacgtggccaacgactacgcgcgccagcttgcggcaggctgggggccttgcgaggtgcgcggggcgagacttgggagacacgggggtggagacaggaaggggcggggccagggcctgggaaaggggacagagacaggtgtgaggcgtagccgagagccctgtggcggggctacaagggctcgtgggggcggggcttgtaggaggcggggaaagatacaggaacggggcggggctttggaggggggaaggaggcggggcgtgggcaagaggaggcggagacagctatggggtatagtcaagggcagcagggtggggctagaaggggttttggggcgactcttgagggaggcgggacagagaccggaacggggcggggcctgaggagaggggaggagtcaggcctggcgtcctgaacccaccggtccctttgcgctcttccgcaggttcttctgagcaacgcgctggcgcggctcagaggcttcaaagatcacttcaccttttgccaacagctaaacatcagcatctgcccgctcagccagacggcggcgcgcgtgagccgggacgggaggggtggatctagggcagatgggctttagagggggtagttggaaaatgtttttggaggactatacaggagtgaaattacgtgggctgcgaagctgggtcagcagagagaacaacgcatctcgagggggcttggccttaagtgccgtgaccacactaggaccagccaggggtgtttctgtgcaaagtgggtgggtttggagaaggcctgctgtgacccatgccctctctgacccccgcctccccagttccaggtcatcgtttataatcccctggggcggaaggtgaattggatggtacggctgccggtcagcgaaggcgttttcgttgtgaaggaccccaatggcaggacagtgcccagcgatgtgagcccaaacaacgaatattcccccgctgggactcctcccccagtgggcatttcctcatcgcccccatggatatcgcctgcttccatgaatacctcccactcatgcatatctcttcccccctcttgtatcttctccctctgccccttaatatcagtctccccttgggaacatatgcctcctgtgagtggtcctcccttttttttttttttttgagacggagtctcgctctgtcacccaggctggagtgcagtggcgcgatcttggctcacttcaaactccgcctgctggattataggcatgagccaccgtgcctggctggtcctccattttaataccccgcttccccaggaaaatttattgctgtttatggacatctccttcattccagaaaacgtcctcccccaaacctcttcctcccccgagaacctgcctcaagggtttcttcccctacttcctccttcactcccccgactccatggtctctccaccctcccggtgggtttttttttccacctggtgaatcttctctgcaatcatttccttggaatctgactgtccccccaccacacacacctccatttcctttccccatctcaggactcttttccttccttgagttttttgtctccatgcatgtatagctttccatgggtactcttgactcagtttccctcctcctttatccgaggtggtaatatttcccagctcagacagccaggcgcaccctccggagctgctgttctcagcctcactgcccgccctgggcttcagcacctattcagtagcccaggtgcctcgctggaagccccaggcccgcgcaccacagcccatccccagaagatcctggtcccctgctttaaccatcgaaaatgaggtgagaccccatttcaatcccctttcctgctcctgtgacaaatttgaagtgtcatggtgagctgtgtggactctgggtcagcaggtccctaggcttatgacctcctgtcacaactcccctcattgtgtgtccttgagcaagtgacctttgtctgagcctcagtgtcctttcctgggactgttatgaggacccagtgtgatcatgggtgacacttgacagacatgtcagagttggtggcaggtggtggttcgcaattttggcagggacgtttcagggaaggtgttcccgataaaggtgacatttaagatatgacctgagggagggagccgtgtggctatttgaaggaagagagatccaggtggggagagaataacaggcataaaagccttcgagcaggagagtgtgcagaattccaggagccacaaggagctcagtgtggctgaagcagggtgaacgggtgacaggtcagaccttgagggccttgaggaccaacaggaagactttggcttttgccagtcattgttgctcatgtgtctactcctagctctttgggaggctgaagcgggaggatcacttgagcccaggagttgtcccagctaattgggaggcccagatgggaggtttgtttgagctggggagttcgaggttgcagtgagtaatgattgtcccactgtactccatcctggcaacagagtgaaaccctgtctgaaaagaataataataaaataggccaggcatcgtggattatacctgtaattctagcaccacgggaggctgaggtgggtggatctactgagctcaggagtttgagaccagcttgggcaacatggtgaaacccagtctctacaaaaaattagctgggggtggtggtacacgtctgtaatcccagctacttgggggctgaggaaggaggattgcttgagcccaggtggcagaggttgcagtgagccgagatcatgccactgcactccagcctgggtgacaaagtgagaccctgtctcaataaaataaaataaaagaagttctgcagtaggactgttcatgttaggaagaaaacatctttttcatatttttattaaaataaaataaaagaagttaaaacgttcccacaggcccctaaaagtcttgtgagttctggcattgtggttcacacatcagatgcccaagttggccctggtccgcagcagaggagggctttgatgggacttagggtatcacaggtgtgctctggctgttgtggggaacagactgtaggcagccagtgtggaagtgcagggacctggaaggggttgactgcactggccctggaaggccctggtaagaggtggtgaggttgaaaataaggttgggggggccgggcgcggtggctcacacctgtaatcccagcactttgggaggccgaggcaggcagatcacgaggtcaggagatggagaccatcctggctaacacggtgaaaccctgactctacaaaaatacaaaaaatttagccaggcgtggtggcgagcatctgtagtcccagttactcgggaggctgaggcaggagaatggcgtgaacccggaaggcggagcttgcagtgacctgagatggcgccactgcattccagcctgggcaacagagtgagactccgtctcaaaaaaaaaaaaaagaaaaaaaaagaaaaaaagaaaaggctggggtgggcacgttggctcatgcctgtaatcccaggactttgggaggctgaggctggcaggtcacctgaggtcaggagtttgagaccagcctggccaacacagtgaaacctcgtctgtaccaaaaatacaaaaattaactgggcgtggtggtacacacttgtagtcctagctactcgggagggagaggcaggagaatcacttgaacccaggaggtggaggttgcagtgagccgagatcatgccactgcactccagcctgggggacagagcaagactctgtctcaaaagcaaacaaaaaaaaaatcaggttgaatggctgggtgtggtggactgcttgagcccaggagttggacactagccccaggcaacatagtgggacccccatctctagaaaacaaatttaaatttttttttttttaatttagtagagatggagtttcactatgttggccaggctggtatcaaactcctcacctcaggttatccacccaacttggtctcccaaagttctgggattacaggtgtgagccaccacgctcggccctaaaaaaattttaaattgagaaaaaaaggggccaggcgtgttggctcatgcctgtaatcccagcactttgggaggctgaggggggggtggatcatgaggtcaggagttcgagaccagcatggccaatattgtgaaaccctgtctctaataaaaatacaaaaattagccaggtgtggtggcatgtgcctgtagtcccagctattcaggaggctgagtcaggagaattgcttgaacccgggaggcggaggttgcagtgagccaagatcacgccactttctgcactccagcctgggcgatagagcgagactcagtctcaaaaaaaaaaaaaaaacaaaaaacccaggccaggtgcagtggctcacgcctgtaatcccagccctttgggaggccaaggcgggtggattacctgaggtcaggagttggagaccagcctgaccaacatggcgaaaccccgtctctactaaaaatacaaaaattagccaggcatggtggcatgtgcctgtaatcccagctacccaggaggctgaggcaggagaattgctggaacccaggggcagaggctgtagtgagcagagattgcgcccctgcactccagcctgggcgacacagcaagtttctgtctcaaaaaaaaaaaataaaaatccggctgggcacagtggcttatgtctgtaatcctagtactttgggaggccaaggtgagcagatcacttgagttcaggggtttgagaccagcctggccaacatggtgaaaccctgtctctactaaaaatatgaaaattagccaggcggggtggtgggcacctgtaatcccagctacttggatagctgaggcacgagaatcacttgaacccgggaggtggggggtgcagtgagccaagattgcaccactgtactctagcctgggctacagagtgagactcagtctcaaaaaaaaaaaaagaaaaaagaaaaattaaaaaaagaaaacacacacacatacacacacaaacccatctgtggacccttttctgcccagcacatccgggcaacgtttgatcctgacacagggctgttgatggagattatgaacatgaatcagcaactcctgctgcctgttcgccagaccttcttctggtaagggaagatcaccaggcctgagggtggggtggtggtgctcggcatggagctagggccccttacctgactctcacctgccccaactccaggtacaacgccagtataggtgacaacgaaagtgaccaggcctcaggtgcctacatcttcagacccaaccaacagaaaccgctgcctgtgagccgctgggctcagatccacctggtgaaggtcagggactaggaatgatgagtgggcagttgggaatggggaagttatggagcccaagagggtggtgggccatgtgtagagtgagggtaggggaggatttacttttccttcagatcagtgggctaagacccacagatcagcgggggaaatatttgagggtccttccatagaattgatattcatagctggtcgtatgagagtctccccataggacacatcatacaaagccattcacatctgctgtggacgtttacatacttagttttggaaattgggggtggggcattcccacttggcccatgaatcaggagagccaaatatcactgcttgaagaattcaccaaagtctgtagtaagaggagcttctatctggagtgaatatttgagagtccacccttggattgattgggtttgggtgagtctcagggtgaatgcctatgggtgcatctggctaggaacagtggtttcccagggcctctcattgatgtttgactttcatagatgacaaaactcacatttgtccacattcaagagcctcgcgtttcatgtgagtccctttgagatgaatgtctgcatatctgtatatagttttgcctgttctaacagagttacccaaattaactgtgactagaataagatagaagattattttcttctaacaaaaagtctggctgttagtccagagaaagtggggtggttccataatcacccaggacctcctcttctatcttgttgctctgccttccccaatattcagtttccacctcatggtccaagatagctgctgaagctccagccgccacatttgtgtttgagtcagtagcagagggacaggggcaaggaacattgttgacaccacttggatcactttctatggggcaaactggtcactcagctactgatagcctcagggaagactggacaatatagtctttatcccaggtagccatgtgccaagctagaatcctattctatggggcaatggtgaacaggaggcgtttatgccacgctcaagagtgatgtggtaagccagatgcagtggctcatgcctgtaatcacagcactttgggagactgaagcaggaggatcgctgagcataggagttcaagaccaggtgggagcatttgctgattaggtgcctacatagtgatgccctgtctcaaaaaaaaaaaaaaaaaaagaggccgggtgcagtggctcacgcctgtaatcccagcactttgcgaggcagaggcaggcagatcatctgaggtcaggagttcaagacaagtctggccaacatggatagaaaccccgtctctactaaaaatacaaaaattagccaggggtggtggcaggtacctgcaatccctctactcgggaggctgaggcaggagaattgcttgaacccaggaggcggaggttgcagtgaggcaagattgtgccactgcactccatcctgggcaacaagagcaaaactctgtctcaaaaaaaaaaaaagaaaaaagaattatgtgggccaggcgcggtggctcacgcctgtaatcccagcactttgggaggccgaggcgggctgatcacgaggtcaggagatcgagaccatccttgctaacacggtgaaaccccatctctactaaaaatacaaaaaattagccgggtgtggtggcgggtgcctgtagtcccagctactcgggaggctgaggcaggagaatggtgtgaacccgggaggcggagcttgcagtgagccgagatcgcgccactgcactcccgcctgggcaaaagagcgagactccgtctcaaaaaaaaaaaaaaaaaaagaattatgtggcggtgactgaaggttgaccttgatgtaggccttaatggggtttatggccagggttgggggacatttgtaggactcacctctgctcaggtacagactgacatccacctcacccgtgtgcccgcagacacccttggtgcaggaggtgcaccagaacttctcagcttggtgttcccaggtggttcgcctgtacccaggacagcggcacctggagctagagtggtcggtggggccgatacctgtggggtgagtggcacaggctgggagaggggtgtggaagcaagggcagaggggtttatccaaggctcacaaccttgccatcccattgggtacagcgacacctgggggaaggaggtcatcagccgttttgacacaccgctggagacaaagggacgcttctacacagacagcaatggccgggagatcctggagaggaggtggggggtgactgagagcactgagggggtggtctgtggtgtgttggggcccaggggtggtgagggaaatttgctgattacatgagtgtgggagacagaggacgaagggagagtgaagggcgggggagccaggcagggtgcagtggctcacgcctgtaatcccagcactttgggaagccgaggcgggcagatcacaaggtcaggagatcgagactatcctggctaacatggtgaaaccccgtctctactaaaaatacaaaaaaatcagccgggtgtggtggcgggcacctgtagtcccagctactcgggaggctgaggcaggagaatggcgtgaagccgggaggcggagcttgcagtgagccgagatcgcgccactgcactccagcctgggtgacagagcgagactccatctcaaaaaaaaaaaaaaaaaaaaaagagttggggagccagatcccaagcctgatcagctcacccccaaccccaggcgggattatcgacccacctggaaactgaaccagacggagcccgtggcaggaaactactatccagtcaacacccggatttacatcacggtagctctcccccatcctgcacctccccacctcgatagaaagggaatcaccccttatctgcagcatctcaaagctgcctggggttggggttgactgccctctactttcacccttcaactcccaggatggaaacatgcagctgactgtgctgactgaccgctcccaggggggcagcagcctgagagatggctcgctggagctcatggtgagtgggtcagagccccatccgagccagggtcctcccaacctggacccctgctggaccttgaaggctgtttctggcccagttctctgctttcaggccccactaagctgaggactccgtttctttcttttcttctctttgagacggagttttgctcttgttgtccaagctggagtgcaatagtactatctcagctcactgcaacctctgcctcctgggttcaagtgattgtcctgcctcagccttccgagtagctgggcttacaggcacacaccatcacgcccggctaattttggtatttttagtagagatggggtttcaccatgttggccaggctggtctcgaactccttacctcaggtgatccactcacctcggcctcccaaagtgctgggattacaggcgtgaaccaccgctcccggccaaggactccatttctgtgtgtggcttttcctctccgtttttctccatctcctgcccaggctccctccacgctctggcgtgccatatccaggcccccctgttaggcatttacctccttccggcctggttcccatgcctacttggatcctgcctctgctggggttgccctaccagaccctcaccttcatcctcatccgttcctcccaccctttaatttcttttgacattcccacacgcccttacccagtttctggcccaaggacacccacaaacccacgactctcaccccctcctggccactctccccccaggtgcaccgaaggctgctgaaggacgatggacgcggagtatcggagccactaatggagaacgggtcgggggcgtgggtgcgagggcgccacctggtgctgctggacacagcccaggctgcagccgccggacaccggctcctggcggagcaggaggtcctggcccctcaggtggtgctggccccgggtggcggcgccgcctacaatctcggggctcctccgcgcacgcaggtgaggggcagcggggtaggcagagaggaccggattgaagtctaccagggagccgggtttgggtgcggagtttcctaggctcagcggggatccatttggccataattagccccaaaccctcgggccaaccccatcccctgggcagtccccgcccagtgccagcccagtcccaacccccctggactgtgtagaggcacagccctagctcatgcccctaaaccaccaactcacctccggccccgcccatttcactttagccccgccctctcaccgcccccaggctctgtcctgcctcacccagccccgcggcttcagccccgccgtaactcccaaagtctcaggtcacatcagttctgctccatcgggactcgaaccctaagcttgggaccgacccatctccccattggctcagtcctccctgtcacggccctggccgctcctctcggctgagccttgcccctctccggcgaaaccccgcccctacaacctagccctgcctcctgacctggctcggccccgcccttctccatccaggccccgcccctctccaactcagccccgccctctctcccgcagttctcagggctgcgcagggacctgccgccctcggtgcacctgctcacgctggccagctggggccccgaaatggtgctgctgcgcttggagcaccagtttgccgtaggagaggattccggacgtaacctgagcgcccccgttaccttgaacttgagggtgagaagggcaaaattgagaaggagatcggagagaggcaagagagagggagagaagagaaacctggctttgccccaactcatctgggcccatccccttccccgcaggacctgttctccaccttcaccatcacccgcctgcaggagaccacgctggtggccaaccagctccgcgaggcagcctccaggctcaagtggacaacaaacacaggtggggccctggtcaggggtagggaaggggtggagtcttacctggggccggcaggtgggggcaatgtgtgaggcatgggatgttggccaggacccaaaaaggtcatgagggtatggggcagagtccagacccaggttaggggcttaaaggatctgaaatgggtgcggcaaaccaggaatgggtcttgaggtttgtgggtgctgtttagtcccaagaacaagatttgaaaatccccatccatgtctagttctgggagggtgttcatcacccctggggtcagattgagggtacgaggacagtggccagattgagggtatgaggacattggacctgggggtggtattcggggccggggaagcaggttaagagtctgggattgaggccctggagacagattcggggatatgcagctgtgtctagacccaggggaggaagcatcgtggggtgagtcagaggaagtctgcacctcctcactcctccttccccctgcacctctccaggccccacaccccaccaaactccgtaccagctggacccggccaacatcacgctggaacccatggaaatccgcactttcctggcctcagttcaatggaaggaggtggatggttaggtctgctgggatgggccctccaagcccaagcctcctgctccgggggcagaccagactctgactctcctcttggggctgctgccattaaaacgctactactaagactcaggtcgctctgtg

SEQ ID NO: 805 - DNA, 9796 bp, Homo sapiens
gcctttccagggccggggaaccccaggaggaagctgctgagccatgggcgcctacgcgcgggcttcgggggtctgcgctcgcggctgcctggactcagcaggcccctggaccatgtcccgcgccctgcggccaccgctcccgcctctctgctttttccttttgttgctggcggctgccggtgctcgggccgggggatacgaggtgagtggggcctccgagctgaaacgtacaggaggcagagtgaaacccagaatacagtctagaggtgtgggtgggtctgtcctgtgggtgtctagtgaatggctgatgatatgacagtgtggtctgagtgcgtgctttgtgtcattgcgaggtctggctgtgcgcatctgagtataggactgtgtctgattgtacctgcctccgtgtctccgggatgcttgcctagactttgtctgcacttaactgtgggattggaggggcaggaggtggcagggggtgagcagtgtatgtgtggggggaggtgctggctgagagctgggactctggagtctgcctgaaattccagcctagctcttacacttcctgagtgtgtgacgttgggcaagtcacctatcctctctaagcctcagtgccttcatctggaaactggggataacatcaccccacctcccacggtggccgtctgctgtcggcaaatgctgaacaaacatcagctacttctattattattttcccggagtgtgaatgagagctgccctgtggggttgtgcaaagtggagttgtatctatgagcacaactatgtatgtgtgtgtcctgcctgggagggcctggcctcctctgcacataggcgagatcaggcctctctgagtcactcacctctagatcaagacttactctgcagcccccgacctcgggggttattgacaaggtatgtgtgtttggggtccctgtgcagacatgccccacagtgcagccgaacatgctgaacgtgcacctgctgcctcacacacatgatgacgtgggctggctcaaaaccgtggaccagtacttttatggaagtgagtagaggatggggactggtccctgggatccccatggtccctgtaatccctctgggtcctggacattagggtggggccagtgctaccctaatatccagggtttgggctcctctgtctaggaataacccccttggctctgctgttccctgagagccttatccctgttatccacagtcaagaatgacatccagcacgccggtgtgcagtacatcctggactcggtcatctctgccttgctggcagatcccacccgtcgcttcatttacgtggagattgccttcttctcccgttggtggcaccagcagacaaatgccacacaggaagtcgtgcgagaccttgtgcgccagggtgagcctaccccaaggaagtgaaaagaggaagcccagcccagcttctgcttctgcatctctggtttctgagatttgtcatgccacgtgcaagctgtataacatgcgtgtcgctccgcctgcctggactctccatttggagacctcctatacatcccacaaagccccacctgctgtgcatcctctgggaagcctgccatgcagggggcctctttcccatatctgggaactatggcctgggagcgacccctcttgtccttccgccagaaatgtgtacacaggcaggctttcacattcccagtatcacccaccctactcccactcctggctctgaccgctgaccctgaccttgcctgtcctggcacagggcgcctggagttcgccaatggtggctgggtgatgaacgatgaggcagccacccactacggtgccatcgtggaccagatgacacttgggctgcgctttctggaggacacatttggcaatgatgggcgaccccgtgtggcctggcacattgaccccttcggccactctcgggagcaggcctcgctgtttgcgcaggtgcgacccgggacctctcttgggcccacttcttcactcactctggctcctccctcgcccagtcaaaccccgccctctccctgcaatctcacaaggaccaggcccaggcctaggcctgttgaagccctgccccttgagtgagccgtaaagccagtggcttttgagctctggcctcagccggctatgcccagcccaggctgacccagctccggctggctccgccctctcccctaataggcccctcttggtgttctggccccacccactagctcgggtcctggctcctccctaaaccgggtggcaagtggatgcctaggctgccttaaaaacaggttcattacctgtgctcagaccccatccatcctcaggctgtggaagggggaacctcattcctggagtcaggcctgctctgcgctttgacagtgctggggaggtgaacctgggttctgatgttggacccgccctctccctgctagcccaaggtggtgagttctgaaacttccccaagcttggaaataagctggaggcctctctgtttcagccctacgtgtttttgtttttgttttttgagacagggtcttgctgtcatccaggctggagtgcagtggtgcaatcctaactcactatagcctcaatctcccggattcaagcgattctcctgtctcagcccccctagtagatgagactacaagagcgcaccactacgcctggctaatttttaaattttttgtagacagtctgcccgtgttgtgcaggctggtctcaaaaactcctgggtttaagtgatcctcctgttttggcctcccagaaggctgggatcataggcaagagccaccacatcgacctagcactgctttttaacctgtgctctgacctgcccctcccaagcagaggggagtttggtggtgagagggctgggcactaattcacactgccttttcctccctcatccccagatgggcttcgacggcttcttctttgggcgccttgattatcaagataagtgggtacggatgcagaagctggagatggagcaggtgtggcgggccagcaccagcctgaagcccccgaccgcggacctcttcactggtagggggcttggtgagggcagggccagccatggtgccacacactcagaagggccctgggcttgatatctgctctgttgtcactgtcctggaattcctatagtctgggaacaaaggccctgcatttccttttgcattgggacacaaattctgaagcccatcctgggtgggacatggccggctttgaaaccagggaaggtctgggtgatgggccaccccttgaacttggtgtgacctgcaggtgtgcttcccaatggttacaacccgccaaggaatctgtgctgggatgtgctgtgtgtcgatcagccgctggtggaggaccctcgcagccccgagtacaacgccaaggagctggtcgattacttcctaaatgtggccactgcccaggtaaccctggtgtccagaaccttcgagtccggtatatacaatacaatgagctctttccatggtacaggcatcccctaacacgttctccttatttttaatttttttgagacagtcttactctgtcacccaggctggagtgcagtggtgcgatctcggctcactgcaacctctgcctcctgggttcaaacaagcacatccagctaatttttgtatttttgcactggggtctcatcatgttgtccaggctggtctcaaactcctgagctcaagtgatctgcttgcctcggcctcccaaagtgccgggattacaggcatgagccaccgcacctggcctctatttttaacatttttatttatttattattatttttttttttttgagacagagtcttgctctgtcacccaggctggagtgcagtggcatgatctcagctcactgcaacctccgcctcccgggttcaagcgattctcctgcctcagcctcctaagaagctgggattagaggcacctgccaccacacccagctaatttttgtatttttagtagacagggtttcgtcatgttgaccaggctggtcttgacctcaggtgatctgcccgcctcaacctcccaaagtgctgggattacaggtgtgggccactgtgcctagtctatttttaacatttttattgagaattccttttttattttttttagactcactctgtcgcccaggctggagtgcagtggcacgatctcggctcactgcaacctccacctactgggtccaagcgattcttctgcctcagcctcccgagtagctgggattacaggtgcccaccaccatgctcggctaagttttatgtctttttagtagaaagggggtttcaccatattggccaggctggtctcgaactcctaaccttttgacccacagccttggcctctcaaagtgctgggattacaggcgtgagccaccgcgtccagcctttaacatttttataattaaaaaacattattttttcacagagataaggtctcaccatgtggcccaggctggtctcaaactcctgaactcaagtgatcctcctgccttggcctcccaaagtgctaggatataggtgtgagccaccatgcctggcataacacgttctccttaaaaaaatttttttttcctttctttaaaaattgatggctgggcatggtggctcacgcctataatcccagcattttgagaggccgagatgggcagatcatctgaagtcaggagttcaagaccagcatagccaaaatgacgaaaccctgtctctactaaaaatacaaaaattagtcgggtgtggtggcgcacgcctgtaatcccagctacttgggaggctaaggcaagagagtcgcttgaacctggcaggtggaggttgcagtgagccgagatcacgtcacttcactctagcttgggcagcagagtgaaactctgtctcaaaaaaaaaattgttttagattaattttttttttttttcttgagacagggtcttgctgtgtggcccaggttggtcttaaactcctagactcaagcgatcctcctgcctcagtctcctgagtagctgggattacaggtgtgagcccctgtaatcatgttctcatgccccctggaggaagatgctattctattcaccatcacaatgtccccctcctggatttatgtgcattcctcattagaagagatagcataggctgggcaagagatagcatggcatggtgactggatgccctcttctaggtagtgggtccaagagaactgctcaacaactggtggctacttttatctgtgtccccacgctcccaagtgccatacccccacccatgcctgtgcacccaacatccttgaccccatatacatcaaaacacagctatacacagggatggcccaggatcctctggcttcaggactcccctcttgcctgcagggccggtattaccgcaccaaccacactgtgatgaccatgggctcggacttccaatatgagaatgccaacatgtggttcaagaaccttgacaagctcatccggctggtaaatgcgcaggtcagtgcgcctaccctgtggtacccttgtgcacatgtgcgcttgcatccgggggccttgggttatgtgcatagctctcagtgctgtctttgttttctattgttctattgtggtcattctataacaaatgaccacacacttagcagctcaaaacaacagaaatacattgtcttacagttctgtaggtaagaagtccagcatgaggccgggcgcaatggctcatgcctgtaatcccagcatgttgggaggctgagccgggcagatcacgaggtcaggaattcgagaccagcctgaccaacatggtgaaacgctgtctctactaaaaatacagaaattagctgggtgtgatggtgcgtgcctgtaatcccagctactcgggagcctgaggcaggggaatctcttgaatccgggaggcggaggttgcagtgagcggagattgtaccactgcactccagcctgggccacagagaaagactctgtctcaaaaaaaaaaaaaaaaaaaaaaaatccagcctgagtctcaccaggctataatcaaggtgttggcaaggctgtgttccttctgcagtctctaggagagaatataatttccttgctttttccaacatctagaagttacccacattcaaaatctattcttggctccatcttcaaagccagccacatagcatctttctgaccctgtttctgtaatcacatccctttctctcattctcacctcttctgcctctctcttccacattttatttatttacttagagacggagtctcgctctgtcgcccaggctggagtgcagtggcgtgctctcggctcactgcaacctccgcctcctgggttcaagtgattcttctgtctcagcctcccaagtagctgggactacagtcgcgtgccaccacgcccagctaatttttgtatttttagtagacagggtttcaccatgttggccaggatggtctcgatttcttgacctcgtgatccaccccgctcggcctcccaaggtgctgggattacagatgtgagccactgtgtggcctaatttccctactttaagtttggctgatgaacaacctcaattccatctgcaaccttaattccccttttgccatgtaatctaatgtggtaataggttctggggatcaggacatggacacttttgggcagttatcattttacccaacacagatgtgttagtgttttgcactaagtggcctgtggctgtggctgtgtgcacagtcagtcactctcatcagcacagaaacttgtctcccctctcccatctcagacaccccttcccatcaatcttgtcctcactacggtgcaatctccattcccaccttccactcgctcccagcactgctatttcaccaaaacagctcttttatgtcatttatttttatttattttttctttttaaaattttatttatttatttatttattgagacaagagtcttgctttgtcacccaggctggagtgcagtggcatgatcttgcctcatggcaacctctgcctcctgggttctagtgattctcctgcctcagcctcccaagtagctgggactacaggcatgtgccaccaaccctggctaatttttgtatttttagtagaggcagggtttcactatgttggccaggctggtctcaaaactcctgacctcaggtgatccgtccgccttggcctcccaaagtgttgggattgtaatctgaggtgggcggatcacttgaagacaggagttggagaccagcctggccaacatggtgaaaccttgtctctactaaaaatactacaaattaggtgggcgtgatggcactcatctgtaagaccagctactcggcaggctgaggcaggagaatcgctggaacctgggaggcggagtttgcagccagctgagatcgtgccactgcactccagcttgggcgacagagtcagactcagtctcaaaaaaaaaaaaaaaaaaaaaagtttattgagcacctactgtgtacattgggggacacagctcgtgcaaaacaaacatccttttcctcacataggtcactttcttgttcctccaccttgctcaggtgaaagtgcacctccattcattataaaaattgtgtctaggccgggcacggtggctcatgcctgtaatcccagcactttgggaggctgaggcgggcggatcatgaggtcaggagatcgagaccatcctggctaacacggtgaaactccgtctctactaaaaaatgcaaaaaattagccgggtgtggtggcgggcacctgtagtcccaggtactcatgaggctgaggctggagaatggcgtgaacccaagaggtggagcttgcagtgagctgagattgagccactgcactacagcctgggcaacaaagtaagactccgtcccaaaaaaaaaaagttgtgttttttggtaacaatctgacagtcctgcaaaacgattattcctgccctataatgtcacacttagtttttccacaaaagtttttaataataaagttggaattattgtaaaagtttagtaaaatttcaggtttattcttgcatctctgaaatccttttaaaaaaggctagtggtcatgtttgacttcagccaaaattcattttcacacccaaccattggcttgcacgccaaatatgtatttagagaaactgaacctatgggatgcatgaatgtgcacacatgtgtggaagtgtgggcccccaggaaggtgcggactcccgagggctcactccgtcgcctcccccagcagcaggcaaaaggaagcagtgtccatgttctctactccacccccgcttgttacctctgggagctgaacaaggccaacctcacctggtatttggggaaactggggagcttgggggggttggcatgccccgtgggtcatgaccctgccctcaatgcccctgccgctgtaggtcagtgaaacatgacgacttcttcccttacgcggatggcccccaccagttctggaccggttacttttccagtcggccggccctcaaacgctacgagcgcctcagctacaacttcctgcaggtgggtaggagccgggctagagggggcatgcagccccgaggcccgacaggctgggcgccccaacatacccctctgcctccaggtgtgcaaccagctggaggcgctggtgggcctggcggccaacgtgggaccctatggctccggagacagtgcacccctcagtaagtgtcgggcccaagaggggaagaggtttgcggctgaagttggaaaccacccctaggccgcccccctcgagtttcttctttttttttttttttttttttttttttgagacggagtctcgatttgtctcccaggctggagtgcagtggtgcgatctcggctcactgcaagctccacctcccgtgttcacgccattctcctgactcagcctcccgagtagctgggactacaggcgcccaccaccacgcccggctaattttttgtatttttagtagagacggggtttcaccatgttagccaggatggtctcgatctgacctcgtgatccgcccgcctcggtctctcaaagtgctgggattacaggcgtgagccaccgcccccagccgtcctcgagttccttcttaaagcctctaagaatcctgcccgccagcaccggacctttcgcttccccttggggtctcagctgagtcccacagaacctcaccggactcattgtctatgagcagatgaggcgatggctgtgctccagcatcacgacgccgtcagcggcacctcccgccagcacgtggccaacgactacgcgcgccagcttgcggcaggctgggggccttgcgaggtgcgcggggcgagacttgggagacacgggggtggagacaggaaggggcggggccagggcctgggaaaggggacagagacaggtgtgaggcgtagccgagagccctgtggcggggctacaagggctcgtgggggcggggcttgtaggaggcggggaaagatacaggaacggggcggggctttggaggggggaaggaggcggggcgtgggcaagaggaggcggagacagctatggggtatagtcaagggcagcagggtggggctagaaggggttttggggcgactcttgagggaggcgggacagagaccggaacggggcggggcctgaggagaggggaggagtcaggcctggcgtcctgaacccaccggtccctttgcgctcttccgcaggttcttctgagcaacgcgctggcgcggctcagaggcttcaaagatcacttcaccttttgccaacagctaaacatcagcatctgcccgctcagccagacggcggcgcgc

SEQ ID NO: 806 - DNA, 3844 bp, Homo sapiens
tcatgcctgtaatcccagcattttgggaggccgaggcgggcagatcacaaggtcaggagatcaagaccatcctggctaacacggtgaaaccctgtctctatcttagtaatactttattaattagtctgggcgtgtggcgggcgcctgtagtcccagctacttgggaggctgaggcaggagactggcgtgaacccgggaggtggagcttgtagtgagccgaaatcacaccactacactccagcctgggcgacagagcaagactccgtctcaaaaaaaaaaaaaaaaaaaaaaaagctctctgattttagctgttaggtgggagatgggttggaggataccaaagccagcttgcaggctatggggataaagaaaacacctggatttcggacctactttataggtagaggttggcagacatgctgagaaggatggatgtggggtgtgagaaaaggggagacagcaagctgcgctcctcatttttaatttttatttatctatttttgagacggagtttcgctctgttgcccaggctggagtgcagtggcaccatctcagctcactgcaacctccacctcccgggttcaagtgattctcctgcctcagcctcctgagtagctgggattatgggtgtgcgccaccacacccggctaatttttgtattttttagtagagacggggtttcgccatgttgtccaggctggtctctaactcctaacctcaggtgatctgccctccttggcatcccaaagtgctgggattacaggtgtgagccaccgcgcccagccccaatccctatttttcagtctagtggatgagtggagggtggggccgtttgctgagatgcagaaagatcagggataggtggagagggagctgagggggcaactttgaggtccaagcgaggatgtcaaggaggatgtctgtctcctccaacaaggtaggctcattccagcctcacggcttttgctgttctgtcttcccatgtgcagaaatggcctctctgcatcttcacatacggggattttctcagccttctggctttggctcaaatctcacctccttggcgtccttcacccatccctccaactaaaatcccgaactcctccacctaaagactcaaattatcctgtttaaatcctgattgcgctgggcgcggtggctcacacctgtaatcccagcactttgggaggccgaggcaggcagatcacctgaggtcaggagttcgagactagcctgaccaacatagtgaaaccccatctctactaaaaatacaagaattagccgggcgtgatggctcatgcctgtaatcccagctactcgggaggctgaggcaggagaattgcttgaaactgggaggcagaggttgcgatgagtggagatcgcgccattgcactccagcctgggcaacaagagcgaaactctgtctccaaaaaaaacaaaaaacaaaaaaggcctgatagcactcaccactattgttaactttctatcttcccaatcagattgtgggctccagtagggcagggtccacatcttggtcttgttcaccactaaatccttagtgcctagcacggagcccaccatagagaatagactacatgaattgtagagtgagtgaataatcctgttggccgtatgcactgttaggagggtgtgtttgagatacagatgacacccagggtctcacattcttgcaggagggaaagagacgtcagccctgggtcccagaagaggccactgacccagtgggagttcagggaaggcttcccagaggaggtggaggtgacagctgcagctataagggaaggaagaacagagcgttatgcagcatgtgaaggctttggagacttgtgagggcacgaaccgggctcactatcccattagacaaaagtggctgaggaaggatgaaactgtgtctaactctgcctggtgaccgaaatcttgtccatgggtgacgcttaagaagtgaccctcggccgggcgcagtggctcacgcctgtaatcctggcactttgggaggccaaggcgggcgggtcacgagttcaggagatcgagaccatcctggctaacacggtgaaaccccatctctactaaaaacagaaaaaattagccgggtgtggtggcgggcacctgtagtcccagttactcgggaggctgaggcaggagaatggcatgaacctgggaggcagagcttgcagtgagccgagattgcgccactgcactccagcctgggcgacagagcgagactctgtctcaaaaaaaaaaaaaaaaaaaaaagtgaccctcataaaaaaattagctgggcacgatggtgcacactagtcggaatgctggggtgggaggatgacctgagtccgggagtcagaggttgcagtgggccgagatcgcgtcacagcactccagcctggcgacagagtgagaccctatcaaaaaatagcagcaggccaggcgcggtggctcatgcctgtaatcccagcactttgggaggctgaggcgggcggatcacgaggtcaggagatcgagactaccctggctaacacggtgaaaccccgtctctactaaaaatacaaaatattagccgggcgtggtggccggcgcctgtagtcccagttactggggaggctgaggcagaagaatggcgtgaacctgggaggcggaggttgcagtgagccgagatcgtgccactgcactccagcctgggagacagcgcaagactctagctcaaacaaacaaacaaacaaaacagcaacaacaacaacaaaaccatcctcccctcccgaggggacagaacagaaacgaatgggcgagtgccgggccaagcagtgggtctccagcaggtggcattaaaataggaattttggctggggacggtggctcacacctgtaatctcagcactttggaaagcccaggcgggcggtcacctgagggcagaaccagcctcgccaacatggtgaaatgccatctctactaaaaataaaaaattagccaggcctggtggtgggtgtctgtaatcccagcaactcgggaggctgaggcaggagaatcgcttgaaccaggggggcagaggttgcaatgagtcaagattgcaccaccgcactccagcctgcgtaacaagagcgtgtaactcttgtctcaaaaataaattaaataaataaataataaaaataaaaaagaatcttcattcatgggaagtcgagaacacatgaaaacaagtaaaggccgaagcgcagtggctcacgcctgtaatcccagcactttgggaggctgaggcgggcggataacctgaggtcggaagttcgagaccagcctgaccaacagggagaaaccccgcctctactaaaaatacaaaattagccgggcatggcggtgcatgccagtagtcccagctactcgggaggctgaggcaggagaatcgcttgaacccggaatgtggaggttgtggtgagctgagatcgggcaattgcactccagcctgggcaacaagagcgaaaccctgtatcaaaaaaaaaaaaaagaaaaaaaaaggaagaaaaggcctaaaggcgccgggcgcggtgggtcacgcctgtaatcccagcactttgggaggccgaggcgggcgaatcacgaggtcaggagatcgagaccaggtgaaaccccgtctctactaaaaatacaaaaaaattagccgggcgtggtggtgggcgcctgtagtcccagctactcgggaggctgaggcaggagaacagcgtgaacccggaaagcggagctggcagtgagctgagatcgcgccactgcactccagcctgggtgacagagcgagactccgtctcaaaaaaaaaaaaaaaaaaaaaaagaaagaaaggg

SEQ ID NO: 807 - DNA, 4126 bp, Homo sapiens
tgcagtgcagagttcctttatttgggggcagtgcccaggccagttggtggaaagaggcaggcatacaacccactgtcaggctggggggcccagcaggggcgatggaggagacgaggtggttgagggattttctcagctgcaggttccaggcccaggacaggaggagatgtcaggcatcagacactgagcctgcttggtgcccgcaggagccaaaaactggcggccagagtttttcccgcccccgccccccgcttacccacaagggtgcccagaggccaccctctgcatcctcctttcccctcaggatggagtccaggcccaaaggggtcagattctgcagaggccaaagaggacactcaggaaggtgacactgcctcagccagccaaggaccccctgcctcgagaggaggcagcagaggaagagcaaacactttaacacaggctgtggcgacccgccccacagcacacacggcacacagagggcctcaggcacagctccccttctcagagcaaaacccaactagacacaaggcccagctcctgcccacagccacagaaacgcgggccacaggcttgcctgggctggcacctactggttctcttccctgctggcagcatgaagggaaaagacacaggagggctcagctgggctcctagactggcccaggctgagtcctggtcccagccaacatctgacaaaggaaacaccccaactggaggagacaaaaggggtgtggctcacatggagcacgctgtcaccgtcctgagggcttgcccatggagaagacagcaccctgggtactgaaggggaacggtggggcaggaaccaggaggtgagctgggactcaggtacttgctgctggccaggtactcacagcgtctggtaggtgctgtccttggccttgaggaagtgcagcacaaagaaagccaccgcctgtaggctcaacaccagcacgacacctccgataaagctggccccgtcaaatccagggctgtgggcctcagggactggggggctccctgcaggggtgaggcagggcaggggtcatagcagtcactgtgaaccaggatcccagtcctaccctcataactggcacaagtaacctggaggccccggtcctcaatatggggtgcttaaaccctgggctccgtttagtccagatcccgcaggcagttgggaagcgcctggtgggaggaacagtggcaggggagggtggggtgctgtccagccctggctctgctcctggcttgctctgtggcttttatgccacccacattctctctgggcctcatgatcacatggtccaattggtggcttggaccagtgactgggctcccaccctccctgggcctcaccagcccaatagggtgaagacagagccagaactcagaccctcccctgctcacaattcctttcagccttggacctcagggttcagagccaagatgcagacgatatagtcccttttcaggactcctaagccctaagacctcagtgtcacccaatgtcagagccctcagagagggaaggagcagggggagaagtggaggccccaactgtcaccctgctaagtgggtaagcgaggactggacagtgtgtgtcagggggaacatggctgagggacaggcttggccaaagtcacctcacaggacatagccagactcacacagggtcccctgaccatctcctctgccccttagaaggtagggctttagggccatggttgccaggctatgcctgggtggctcccagctgtgccacggtacctgtccactcctagcagggatttgatttcaggccctgggctgggtgcccagaacagggcagggctggtggatggaagatcattctgggacagtggaaaggggcccagcctgaactgggtctccctcccagaaggtgtaaggggtggaaggagtctgacaatatgaagggcaaacagtggtcccagctcccgctcagggagccccagagaaggaagctgggggatgaggagcagaagaggggagaaatgagccacatgaggctgatccggggctccagctgagggagctgagccatcaataattcagcttctgagatcggtttctggctttaattaaccaagggcctcttcagccatccctgccaagtctggtgacctccagcccctgagagggagtgggaagcaaagggtggcattcttgcctctactccgccaggaacccgccttgtgaccctctctgggcctggagggtgcagtaggcaggcactgaggatgtctcctgagcaactcgagccacacaccctcacctccaaggacaagtcccgaggagtgaccttgagttcccagaactggcaatggggaggagggatgggaactgtcatttcttgattgccttcagtgagtcagacactgaagtgggcactgtacagcttctcataaaacctgcagagcaactctatgagaaaggcatcatccaacccatttcacagatgcggagacaggctccgagggagaaggcgcagggccgaggtcacagagcatgtcagtgcctgagcccagagctgtcttcccctgcacctctgctcctcccactgccccgtctccagggagtactcacctgttgtgactgtcttcggttcataggtggggtggtggtgagcagctgaggagacaggtgatccatagcaaagcagccttcccaccccctgactcccatcaagaccccagcccccactcaccgctaaacttccgattcagatgcagccctgtccctactctagacatccaacatacttgcaagccccacacagttccctccaccagatgtgctctctctccatctctaccttccaggctcattactgatgccacctcctccaggaagcactccctctcattccctctgaacttccaaagtccttgctatgccttaaactagaagaagagctaacactcccatcccctccacacacctgtactaattttcagatgaggaaataggcagagagaggaggggacttctcagtgagctaaaggcagaactgataccgggcccaggtatgggtgagcaaaatccaccgcctgagagaggctgtttcctcctggggggcaggctatggctggggagacccatgcaacttggcttaggtgcaagaacccccttacctggacatgcctctgagcggttgtagatggagcaaccttccttgaccacctcagattgggccacacagtgtcctggtgagagaaggtgcaggggggaggtttggggagaggggccagggccttggggttcagagctgggggcactcaatctggggagggctcagctccatacctggctcctctggccggcactgctcccacatgcagctggagagattgcgcgctctgtctccctccacgcagtgctcacagacctccagctgtttgcaggccccttggaccgccggccagatattcaggcggatcagggctcccctcccaaagcctcgagctcctttacctggtagtgcggtggagtgggaagggagaattcctcgaagccaagctgtggcacccgcccaccctcccacccaacactccggtggccctcgcccctctgcacacatctgggctctcacactcacccctggatccccaagccccagcgcacacctggagcttccacagcagaggtctacacacacctagagcctccccacattcacccagagcccctccctttgcatacacccggggttcccagattcagttggagccacctcccccagaccacctgaagctccctaggcccccacacctggggcctatatttacacacagggctccacacagagctggagccccctctcccacccctggaggcctgcacttggccggaaagccccctcccctcaagcccaggctgctcctggggagacggctggctgaggtgcaagctccatccgtccccgtcgagcccctagccagaccctgccgcgagttaccagccacagccagctgggcacataggaggaggcagcaacagccgccacagagcgcagtccgcaaggcgcggggtcccggagcctccatgggctcgcggggtgggggtggccgggggcggtggccgggatcggtggacagctgccgggcgc

SEQ ID NO: 808 - DNA, 341 bp, Homo sapiens
tttagtagagatagggtttcactatgttggtctggctggtctcaaactcctgacctcaagtgatccacccgccttggcctcccaaagtgctgggattacaggtgtgagccactttgccccgcctaaatttttattttttgtagagatgggttctcactatactgcccaggctggtctcaaactcctggcttcaaacaatcatcccgcctcagtctcccaaagtgctggaattacaggtgtgagccactatacctcctggccagttttttattttttaatatatacagggtctcactctgtcacccaggctggagtgcagtggcatgatcttggctcactgc

SEQ ID NO: 809 - DNA, 142 bp, Homo sapiens
agggaggagggatagcattaggagatatacctaacgtaaatgatgagttaatgggtgcagcacaccaacatggcacatgtatacatatgtaacaaacctgcacattgtgcacatatactctagaacttagagtataataaaa

SEQ ID NO: 810 - DNA, 5889 bp, Homo sapiens
ggttgctgtcttcctcgtccctccggcccttcttcctactcagcgtctcacttttggcctattttctgctggatctctggcagcctcgctttctccctgacgtttcaggtgagtgtttcttcattcagtaagcacccattgggtacttgcttggtgcctgattccgctgggtggggttaagtggcgaggggaacgtacagcaggccacctgcctcccaggcatggcccacttcctttttgtacggaattccctaaaatgagaattgcccctttcccaaactaatactactgtaggtgcagtggttaagatggtgaagtctgcagccatattacctgggttccattctctgttctgccatttaccattgctgtgaccttgtaaaagtagctcaatttctgtttgtctcaatttccttatctgtaaaacacagatgatagaacttacttcatagagaggtgaggagaggattaatgagttaatacacatgctatacttatgatagtgtttcacatataagccttataaatagaacgtcagtgtgtgtttttcttgttatccatataatttacttagtaggtgacaggctgtatgtgagttgcttgggagataagcatgagtaaaatctagttcttatgttggagaagggtaatgtctaaaggagacagacgcaaacaaaaacatgtaacagctcccccattggcatctgaagaaggtgctctggggctgcagaggagggacaactatttctgccttggggagtgtctccagggcccctaccactcaataatttgcccccctcctctctctctagcatcatccccagagagccacactctgacaggtgagtacaggccacctcttgaagacaaatgcccacatcctgtcctgcttgctggtgccagtgtcaccatggagcagggcagtgccccagcattgtgaatgaactggtaacaagccatgggtttttcatggtcctaggctcctgtgtaggtgtttgcgtgcctgctccttttggggcagagggttgggtcctcctggctttgcttctaagaccaggacagcctccttttgagaggtggggtcatttgcttttttagactaaagatatctttggcattctcagagggatttaagtgtctaggaagctggtatctgaggcctccaggggtcatgtcatgtctccccagtgagggtgcggggtcaggcgcccggccgcacctgctgagtgtgcccgagttgtgcagatacctggctgagagctggctcaccttccagattcacctgcaggagctgctgcagtacaagaggcagaatccagctcaggtaacctcccctacatcatacaacagttcactacactgaaggggaatagaggtggcgggggatgggagtggagtgatataaactccccgcttggagaccctgaaagaagaggcctgggcgccttcttgaggcaacattcacagctaatccctggtgcaggaggcagtctcacctcaggaaataagcttttgatagcctgacactttctcctgccaaggcagaccagtgtgaattacaggtggtgggcattatgtattgccagcttcctgaattggtggtcttgagcatcctcttaaccaaactggaccaccccattccttgagtacatacccatccttctaccagctgagcagtagtttcttacccagccgagcggggcgcatatctcagcgtgatgttcttagacttttgctcttctctgcagttctgcgttcgagtctgctctggctgtgctgtgttggctgtgttgggacactatgttccagggattatgatttcctacattgtctgtgagtagggtctgtccctgccctatttaaagccctctcctttcttctttccttggactgacccagagggaagactatgctctctctgctcagtttctgatttgtggagatctccagggatgctttagtattagtaactgtggaagacttacctggggaggagggcagtggatgtggcaagaagaggttggcacagccttgggaaaggaccttgcctaccttcagcacttcagtttagggaccagttgaatgggggctcttaggaaattggcgtagggagctcttagttcacgttcttaacccatagtgttgagtatcctgctgtggcccctggtggtttatcatgagctgatccagaggatgtacactcgcctggagcccctgctcatgcagctggactacagcatgaaggcagaagccaatgccctgcatcacaaacacgacaagaggagtaaggggctgccctaagccaggagggtgaaagagcgggagggccttggcttggggttcatgagatgccctggaattgagatcttctccagttctttagctgtgtttgtctcccctcccatcattcatgcttggtcattgctctactactcttgcttttctagagcgtcaggggaagaatgcacccccaggaggtgatgagccactggcagagacagagagtgaaagcgaggcagagctggctggcttctccccagtggtgaggtccagggaaagcgggggtgtcaaatagaaagccagaggaaaaatctttctgctttggagctgccacctccaaaggaggtggaagccagaggttttgggagaggggatgctcctgataaattggttctcttatcccctcacatgtcgtgttcatcctggttctcctgccaggtggatgtgaagaaaacagcattggccttggccattacagactcagagctgtcagatgaggaggcttctatcttggagagtggtggcttctccgtatcccgggccacaactccgcagctgactgatgtctccgagggtatggggagccctttgctgccctgctccccgccacaatctttgtgttccctaccatgggtacttactgtgctctctggcccactcactctctaattctctcagctcctaaaagaccttaacacctaaggcttggcccagctttccatgtcttgagttctcatccttgaactcattgtctgttgtggctaatcagaccagcagcaggcccattcttaattctttgttctctgcacagatttggaccagcagagcctgccaagtgaaccagaggagaccctaagccgggacctaggggagggagaggagggagagctggcccctcccgaagacctactaggccgtcctcaagctctgtcaaggcaagccctggactcggaggaagaggaagaggatgtggcagctaaggaaaccttgttgcggctctcatcccccctccactttgtgaacacgcacttcaatggggcagggtccccccagatggagtgaaatgctcccctggaggaccagtggagacactgagccccgagacagtgagtggtggcctcactgctctgcccggcaccctgtcacctccactttgccttgttggaagtgacccagccccctccccttccattctcccacctgttccccaggactcaccccagcccctgcctgcccctgaggaagaagaggcactcaccactgaggactttgagttgctggatcagggggagctggagcagctgaatgcagagctgggcttggagccagagacaccgccaaaaccccctgatgctccacccctggggcccgacatccattctctggtacagtcagaccaagaagctcaggccgtggcagagccatgagccagccgttgaggaaggagctgcaggcacagtagggcttcctggctaggagtgttgctgtttcctcctttgcctaccactctggggtggggcagtgtgtggggaagctggctgtcggatggtagctattccaccctctgcctgcctgcctgcctgctgtcctgggcatggtgcagtacctgtgcctaggattggttttaaatttgtaaataattttccatttgggttagtggatgtgaacagggctagggaagtccttcccacagcctgcgcttgcctccctgcctcatctctattctcattccactatgccccaagccctggtggtctggccctttctttttcctcctatcctcagggacctgtgctgctctgccctcatgtcccacttggttgtttagttgaggcactttataatttttctcttgtcttgtgttcctttctgctttatttccctgctgtgtcctgtccttagcagctcaaccccatcctttgccagctcctcctatcccgtgggcactggccaagctttagggaggctcctggtctgggaagtaaagagtaaacctggggcagtgggtcaggccagtagttacactcttaggtcactgtagtctgtgtaaccttcactgcatccttgccccattcagcccggcctttcatgatgcaggagagcagggatcccgcagtacatggcgccagcactggagttggtgagcatgtgctctctcttgagattaggagcttccttactgctcctctgggtgatccaagtgtagtgggaccccctactagggtcaggaagtggacactaacatctgtgcaggtgttgacttgaaaaataaagtgttgattggctagaactgctgcctccctgactgtgagctgccttccacaccctgcactgcactgtgttctctcctcacccttaacctgcttcactccagtctgttctggctgtttattaccttgttgcaaaacagggccgaagcaaggattaccttgacaaccctagcttctccttagccatcttccttgacagtgtgatctgtttagtgagatttagcatgtgtgaataaagtatatgcaggaggaaattgctttgtcttcccaatcggtagaaattcgggaccataaaaattgtgttttaccatgtggcctacaaccttaacactgctttcttaagaagtcttcacccatctacatgctaacaactcactcagcctggatttatctttactggggaagccaaacaagcaatagaggacctttacctgtgttagaaatgagttggagccaaggaacactgaagaaatagtatcttaacagttactgagtccattgtatgtgcttggctctgctctgagtgatttatatgtattaagatttttcctcacaggtcagatatatactgttactaacttcattttatagacaggttaagcttcctgaaggccacaggtcccagtaaattgtggagccagaacccaaacccaagaagttttggcttcagcaaatgcatcagacagcccctgtccattaatagggcacaggtaggaagatgcacaaggatgtgggaactatagagaaccaatctgatgccttggcttaacaaagagtggacatggcaagccttcctctttggggaagaaaagcccagaactgagcagatggcctcctttatgagttcatgtcctccgccttcagctggaggtaccatatggcgatgctacctgtctttctgctggaggtaccatatggtaatgctgcctggctgtctgctggaggtaccatatggtaatgctgcctgtctttctgaggttgacttttatgccatgtctttcctaagtgtgtaagaatttttctgtttgcttcacatttgactgagaatcattctagggtttgattgagcccctgtcctgtgccactaaaggaactcgaacttttcatcacttagagatttcagaggggaatggaaaaacagttctaatcaataagcaagcaattcaagaaaaatagaattaatcaggcaatgactgcaacatgtcctatctttaatctattttcttattaagcttggacattgacaatagaaccagaagcttgtagctggatcaaaatattctccataggcctggagtttcatgagggtctattcttttgttgttgttgttttggtttt

SEQ ID NO: 811 - DNA, 191 bp, Homo sapiens
gggccggggatggcgctgagcctgggcctgggtctgggtctgagcctaggcatgagtgaggccaccagtgaggcagaggaggagaggccacggccgagcggtgggacgcctggccacgacgctgtggctgcgctccgcggctgggaggcggtgctggcggcggcgcagcggttgctggtgtgggagaagcc

SEQ ID NO: 812 - DNA, 686 bp, Homo sapiens
gggtttttttttttttttttttgagacggagtcttgttctgttgcccaggctggagtgcaatggtgcagtcttggttcactgcaacctctgcctcccaggttcaaacaattctcctgcctcagccgtccaagtagctgggattacaggtgcatgccacgatgcctggctattttttgtatttttagtagaggtggggtttcaccatgttggccaggctggtctcgaactcctgacctcaggtgattcacccacctcggcctcccaaagtgctgggattacaggtgtgagccacggcgcccagcctcatgagggtctattctttacattcaccatggtctgatggttgctacatgtttgtctatgattttttttttctattatcaggtgtcttggccggttcatgccccacgatgaaagggccagaggttttcatatgagtaaaagaaaaaagcagaaatgtgaaacctacaattaggctaaacaaaaatcaactggaaaagtacaggctgaggggagaagagttggctacatgtttatgttaggggaggagggagtacattttagctatgtattcaaacagctaatagtttaatgttgctgcttataaacttaattttaggctgcattaataaaagtgtagtctccaaaacaagaaatgtgataattctagtgtcctgtgcacgaa

SEQ ID NO: 813 - DNA, 26166 bp, Homo sapiens
gccacgtctgcaagtcagcgtttattgctcaagcgtattaaacaaaaatgtagactgaaagagacagttcttttaaaccccatttttccggattttttaagcgctctaaaataagaaaataagaaagtgcaagccagcaaaaacgctccaagtgcctaattctgactctgaaacttgagctctctggtctgcccccaagaagacatcagcccgccccgggtcgtccctgtggctcccaccccattcccaggagcagaccccgccagcctcaaagctgcagggaggtgggggtggcctgcagacagggtggggtctgcatccggtaccagtgacagcagcctctcctctcccacggtggcgcttgtttggggctgtggccaaagtgtttgcccggcccctgactgtgtccttccggagctgccgaggactgcagagagggcctggcttgtcccctctaggagcagctgggaaggtgtcttgcctgcatcccccttcaatggttgaaaataatgattccacttgtcatgaacaccatgaaggtatcttggcagccagagtcactcctgttccgcagtgggaaacctgggagggtcctcaaaccccctggcagggtctgcaggccgccccatccagctgcatctcccaggcctcctggttctttgatcttgatggccccaggccacagatgcatctccgggcctttccagcagcccatgggggaccagtcaatacaccccacggcggtgaagagaaaacgttcatgtcttctcagatcagaaggaaagaaacaaaaccattgtgaaggaaaacacctgctggaaagtaattatcaaagtaacagcattccagtttcacagtcgccccaactcactgtggatttactgccgtcagctgggaggacccaggcgccctcgggacgaggagacgcagggaaacccactcctggccatggcactacccaaagccagtgttattctcacacccaactgtccctgcagcctggcaggtgggcagtgaccgcctgggctgtaccctaagaccccaaaacagcggagatggagaagaccgctgccctggggccttctcagtgaggatcaagacaaagtacttgctaggaggtagagggcgctgggtgaacctgtgagaattcctgggctctgacctgatctgtcctgcattttgagtaatgggagcaaacacaggagggaggggctcagcttcccccggtcactggggccagggagacgtggtccagccggtttacaaagccttggatgcagccccacccccaagaacactgcctgtcacagcagcggccacgtggcactccaagctgggcatgacagtgcccgggacgtgggcagcggccatgtggcactccaagctgggcatgacagtgcccgggacgtgggcagcggccacgtggcactccaagctgggcatgacagcacccaggacgtgggccggccagtgtggcggtggatccctctagaatgactgggtctaagtagggagacagggcaggcgacccggcgtggactggtgtggatttcacctgggagagcagcggcagcctgtgtcgcttgcgcccaggctctggaggaggggcccctgcggctcccgggccaggacagaggcgcccagccctgctctcactgtccaggaagagccgctgggcagcctgagcctggggcaggtgcaccttgcagggaagtgggtaagatcccactgggctgactgagtacccgggacagaccctaagcgtggagggaggaagcccggtcagagtgggcaggagacgcagggacccacagtctggtcaggtccagagagcccactccagcccaagccatgagagaggcaggaagaggagctggggccagttcaggggtggggctctcaagaggccgagccgggggcccttcctcggcctgggaagttgcggccatgctcctgctgttacgacacgggagccactcggagctgactgatctcactgaggcacagactagccaacattggcctattttaaaattaaactaccctaggaagtgaaaaccccacctgcagcctggtttgccctcacacaagggaaaagaggtgttagaagcagtagctcagggcgattaggggttgtgcgtttccatgcttggggccaggctgggcgctgccacccggtttccgcgtctgggggtcactgggccatttgcaccacgacggctctccaggctttctccttgtcgaactccttcagggggctcctggccacctgcaaccgagacaggaaaggtgttacttcaccagggccacctgtgcggcgggaaggtggacacgccactcggccacaggcagcgagcagccagcgttcagaagttttcttcgaatgtgaaggaagtggggaaactaacccctgggcctctgtggaaagagataaaagccttcacttcctcagtgtcccagaaacgcctgcatccccccccgcacacacggtttctaccgagcctgggatggagcagcccttcactcggccccttgccctggctctggggcggggagcggggggaggccgcccaaggttgggcatgtgcctgacggctgaggaagaaaacacttaaggcagaggtaaccagatgcctccaggcaaaagggaggacagcgccagccccagctgtccaccctgagccccagttgtccaccctgagccccagctgtccaccctgagccccagttgtccaccctgagccccagccacccaccctgagcccctgggccccagccgtccaccctaagccccagccatccaccctgagccccagccgtccaccctgagccccagccgcccaccctgagccccaaccgcccaccctgagcccaagccacccaccttgagccccagccgtccatcctgagccccagccgcccaccctgagccccagccgcccaccctgagcccctgggaccagcagttctgggatctggggagaacacctcatgcgtctgactctgggccttgctggtcacaacagaaacccaggcgggtctcatttcaggcccagggactgccgtcctagcagggagactgaccacagccaggaaaaatggcagcaaagcaactgaggaggcaggttaagggaacagcagtagggagggtggagggtgggggcgacggggtcagctgagaaacgagccaagggcaagagagcgtcctccgggacttagcgggcactggaggctctgcaccaaggttctgaggccggtggtgtgctgaacacaggagggcagggtgtgcagggcaagagcagcggccggtccgcccaggatggcctagaggtggggcaggactcagagccccgctgagtggctgcccaggtgtttgggcatcaaggtgacagtcctagtggtcactgcacctgagggtcagcgggcaggtttgcccaggggagcaccaccaggacccgtagctcggtggggggaagacgctgagcctctgcctttcagatgtgggggcagcaagacagtaggcagggcccgggggaacattgttcaggcagtgacagccagaagttgttgacaccccagctttacggagccccatgtgccaggctgggtgggcattgccttccctgcagaaccgcgtccccaccagagaccagggaaggaaacttcaggacctgtgggagtcctcacaaagccctcttctgtgtctctaagagcaaatctgaaagcattaagtccagaatatttcccagggatgggtctgggtttacccaggctttgtgtttgtatttttaaaagacattttacggctgggcgcggtggctcacgcctgtaattccagcactttgggaggccaaggcaggcggatcatgaggtcaggagttcgagaccagtctaaccaacatagtgaaaccccatctctactaaaaatagaaaaattagctgggcttggtggcgggtgcctgtagtcccagctactcgggaggctgaggcaggagaattgcttgaacccaggaggcggaggttgtggtgagccgtgatcgcgccactgcactccagtctgggtgacagactgagactccttctcaaaaaaaaaaaaaaaaaagaaaagaaagacattttacttcttcggggtttttctggggtgtttttaaaaatacaaagtggcacaatgaatcttcgagggccacgtcgtgtggccctcggaggccctcaccaggacaggagcccccaccgcaggcctctcacctccccagcgggtgctcctgtgggccactcacctccccagcacccctgaaacccacaggcctctcacctccctggctgagcacccctgtgggccactcacctccccagtgcccccaccccacaggcttctcacctccctggctgggccccccatgggccactcacctccccagcacctgcaccgcaggccactcacctccccggctgggcacccctgtgggctactcacctccccagcaccccctccccctgcaggccactcacctccccggctgggcacccctgtgggccactcacctccccagcttccccccaccccacaggcttctcacctccctggctgggcacccccgtgggccactcacctccccagtgccccctccccctgcaggccactcacctccccagccaggcgctcctgcgggccgttctgggtgtcccaggatgcaccctgcagccttgcactgaccttgaagcgcacgcactggatggcggtgcccgtgttgaggccggcctgcagcaggagcactagcagcagcagcagcagcagcacatcgtaggatggctgcaggcggaaggaggtgtgagcagagtggcccagccgccctccagcccaggagaccaaagctccctcgtgcccacggccttcacaaagagcaggtgccagggctcgagtcggagccccagtaacccaaacgcattgctatttcaacaacctgatgataatcattctagctcaattaatgaggtcaattctgctttaaattccatcagcttgtgttcaacatacaggaataaaagtgaccgagccactgccaggccccgtggacagtgctggctgctagtggtcaagtcgctccacccctcctgctccaacacgcgcaaggctcagtcccagagccagagagaatgtccgcgggaggcagaagcgctgaccgttccgtgtcagcaggatcctgagcggaggagacagggggcagccgtcctggggggatggggtgcacagacccccaacagcttcacccctgagcaccagctgctaggaaggaaggggcaggaggcagcgcggtgagctcggcagggaagaggatggagggagcggccgaggatgcagggggccagagagtgaccacggagcacccaaaaccctctgtgcccatggatagctttcccgtgttggctcaagaaaaacaaagcaactaaatgttaacacacaaaagagccaaacatctatccaatgtcactgctacaaaaagtaagagaagaaacagaacgaacagctcttctcaagttaacataaaacttttttttgcgacagtctccctctgtcacccaggctggcgtgcagtggcgcgatctcggctcgctgcaacctctacatcccaggttcaagcgattctcctgcctcaacctcgccagtagctgggattacaggtacccgccaccacgcccagctaattttcgtagttttagtagagacggggtttcaccatgttagccaggctggtctcctaacctcaggtgatctgcctgcttcggcctcccaaactgctgggattacaggcatgtgccactacgcccggcctggattttaagtaattattagaaagtctggtacttgtgttcccagctggagtttaccctggaggatggtaaaggcatgggccccatgtggtctttgctcttcggttgttgagacaccatttattgcaaagcctatgctttcctcagtctcaaaaaaaaaaaatccagagccattaaagaaaatattaatcaacttaactatttaaaaaaatagctttcacataacaaaaatcacaacaagcagaacaagaaatagccgccaggctgagaccaccatttgtatcctccatcacagatggagctggtctcccccggcaccagggttagcggaaaatggtcaggagacatgagcagagtccactgaaaaagcaatgcagacgtcctcatgctttgtaagaggtcctcgtcctcacccacattgagacggaggtgctcccacccgtgtcaccgaactccagcgtgacaccctctgtggggggctgtggagaagtgagcaccttcacgccattggcaggagggaaggtggacggcccccattgaggaggtcgccgagatttatcagcatgacagctgcacctaccctctacccagcagtctctctcctagctggatatcctaaagatgcgctgaggattcaaaaggaagatgcgtgcaggttgttcacggaggagttatttatagtagcagacggttggaaataactcagtttccatcactagggactggctgggttgaccgggcagtcaggagcgatgaaggaattcagaagagctctgatccccttgggtatcgagaaaacaccaggataaattattaagtttaaaaaaacaagcaaggggctgggcacggtggcagaagcctcctcatcccagcactttgggaggccaaggtgggcggatcgcttgagcccaggagctcatgaccagctcaggcgacagagtgagaccctgtctctgaaaaataaaataagtaaatacataattaaaaagcgaggtacatggctgggcacagtggctcacgtctgtaatcccagcacttcgggaggccaaggtgggcggatcgcttcagcccaggagctcatgaccagcccgggcaacagagtgagaccctgtctctgaaaaataaaataaataaatacataactaaaaagcgaggtatatggctgggcacggtggctcacgtctgtaatcctagcactttgggaggccgagacaggcagatcacttaaggtcaggagttcaagaccagcctggccaacatagtgaaaccctgtctctgctaaaagtacaaaaattagccgggtgtgttggcatatgcctgtaatcccagatgctccggaggctgaggcaggagaatcacttgaacccaggaggcagaggttgcagtgagccaagactgtgccactgcactccagcctgggagacagagtgagactctatcttaaaaaaaaaaaaatggcaaggtacagaatagtgattctagtatacaagctattttgtaagaaagaaaaaaaaattatcatctggttgcccataagaggagcaggtcagtcaggcatgagaccacagcttttctgagctcgtcttttatagtttggcttttgaaccacataaatattttatatattcaaaaaataccattttaaaaagaaaaaaagcaccaagccctaaaatggaatacaaccagaggccattaaacttaatggggtatcgaacccagaggataaccccacacagaaaggggccgacttcgatggcgtgtggccgtcccctgctagcagaatgcatgctgaagataaaagggaagcctcaggctcactcaggagatggcccctgggtggtaatattgtctcttgtaatcgtgaacaattatatgcatattgtaagacaacatgaagtaggagatatattaaatgtcacaggaaacaaaataattggagtaggagtgggtgaagcaaacacaagagaagtgaagaaaaaaccctgggccgggtgttgtagctcactcctgtaatcccagcacctgtgggaggccgaggacgctatcccccttcagacagtgactccatgcccccatcagacagtgactccatcccccatcagacagtgactccattaccccattagacagtgactccatcccccgtcagacagtgactccatcccccgtcagacagtgactccatcccccgtcaggcagtgactctatcccctgtcaggcagtgactccatcccccgtcaggcagtgactccatccccccatcaggcagtgactctatcccctgtcaggcagtgactccatccccctgtcaggcagtgactccatccccccatcaggcagtgactccatccccccgtcaggcagtgactccatcccccgtcaggcagtgactccatcccccatcagtgactccatcccccatcagacagtgactccatcccccatcagacagtgactccatcccccatcaggcagtgaccccatcctccatcagacagtgactccatccatccatcagacagtgactccatccatccatcagacagtgactccatcccccatcagacagtgactccatcccccatcagacagtgactccatcccccatcagacagtgactccatccccccatcaggcagtgactccattccccatcagcacacgcatgttgacctggagcaaacagcttaatacaggtcttctaatgatttgggtgcaaaaccacttatactggaaaaaaaaaaacaaaaaaacaaaaaaacactaggtatctaagaaatacatctagctacacgtgcctgagcctcagaagtcgtgttggagataagctcctactgggtcagctcaaagtaacaggactttgaattctccttaaattcacctgttaaactcaatgcagttctgatgcaaatccgaaaagcatgtctcataaacccaggacagattctaaaatgggctcagggacagagtgggtcccaggtccctgtgaagcaggtggtggccccagatacagggcggaatcgaggccccgaggccctggggccaggctggcattggggagcacggtcaccgctgcccaggaacagcggaggaggtgcctcctggagctgtccctggagccagcgcccccagagtcccaggcaaagccagcaagggccaggccaacacgcagagcaccacatgtctggggggctctgaaataaaatacaactcacttttatggctggcgggtaatccttaaacatctccacgattctcatgatgctgaatgacagatatccagaggctgtgaacagcagcggagacgtgaggctgcttatggcaatcaggacctccacctggaaaaaaagcgcgggttgcaggaccacggccggagcctgggagcccaggacagcgggcgtggccagggctgggggggcgggcatggccgggcactcatgggcatagtcccaagctggttccctgcatgactcctgctgaaacctctgccttttcttttttctttttctttttttttttttttttttttgagacaagtctcgctgtgtcgccaggctggaatgcagtggcatgatcttggctcactgtaacctccgcctcccgggttcaagtgattctcctgcctcagcctcccgagtagctgggattacaggcgcccgccaccacacccagctaatttttgtatttttagtagagaccgtgttttgccacgttggtcaggctggtcttgaactcctgacctcaggtgatccacccacctcggcctcccaaagtgctgtgattacaggcatgagccaccgcgcccggcctgcctttctttcttttttgagaggcagcctagctgtgtagcccaggcaggagtgcggtggcacaatctctgatcactgcaacctctgcctcctgggttcaagcaattctcccgcctcggcctcttgagtagctgggattacagacatgcgccaccacacctggctaattgttttgtatttttagtagagacagggtttcaccatattgtcaggctggtcttcaactcctgaccttgtgatccacccaccttggcctcccaaagtgctgagattacaggcatgagcagcctgccttttcattcacagcacagtgccacaagttttgaaatacttaccatctaggcaaggtggctcacatctgtaatccaagcactttgggaggccgaggagggcggatcacctgaggtcacgagttcgagaccagcctggccaacatggtgaaacccccatctctactaaagatacaaaaactaagcgggtgtggtggcgcatgcctgtagtcccagctacttgggaggctgaggcaggagaatcgcttgaacccgggaggcagaggttacaatgagctgagatcgtaccactgcactccagcctgggtgacagagcaagactctgtctcaaacaaacaaaaccaagaaacaaaaaacatttacctgcaattctccactcttgaaaaaatagcccttccgcatgggtcacctccttcactgctctgaagtctgtccttttaacccaccccaaatcttcctgtttgacccatcaagtctcagagacagccttcactcatgccaagcatgggcagtcaccttgcaaagcactcagggtccacattttggcagcagtcattaacgatcgaccagttcaattgtttgcggtcagtttgtggcagtttcggccgggcgtggtggctcacaccggtaatcccagcactttgggaggttgaggtgagtggatcacctgaggtcaggagttcgagaccagcctggccaacatggtgaaaccccgtctctactaaaaatacaaaaattagccgggcatggtggcaggcgcctataatcccagctactcaggaggctgaggcaagagaatcacttgaacccgggaggcggaggttgcagtgagccaagatcgtgccattgcactccagcctgggggacaagagcgagactgcatctcaaaaaagaaaaaaaaacaatcgaccagccttaggaggtgcagatgatgctcagacactggtctccttccaagggttaggcacagagagcgcttccagtgtctacaccaccttgttcaggtctgcctgtccctgagaacagtccctgctgagcgggccagcctccacctcccacaaccccaccttcctcattgtgcaggccctgcagcccagtcactgcgctctcttgggctggagcctggtcacatggcaccaagggagggctaggccaggccctggccccgctcggtgggtccctggcacccagggctgaggggttcacccaccagacacttgctgggacactctgctgccacatgactggcaatggcacttggaaagcactaagagaaaagaaaaaggaaagattttagaggaaatagtcgaagaagtcgaattccaaacatgtgccctcccaccagtgacccctccatgcaggctgcctggctggcttgctgtggggggcaggggggatggtgcagtgcccaaaggcgcagctggggcagggacgggtccgcagggaagcaggggtagcctctcagaggttttgtgtgctctctgttcctcaaccattggtttaaaattttaagcctgtagaaaagctgcaagagcagtggagggggcatctgaggccccaaaatcaccagagtccttgacattcatatctgtgctctctccagctctcccagatagcctgatgcctgaacacctgagagtgctggctgagcccagggcacactcttgcacacacccaaagcaggaccacgctcgagagactccacgtggggccgatgtggtccatgcccagattcttccagttgtcctcatcatgttctttctttttaattttttaataatttttctttcttcttctcctttttttttttaagatggagtcttgctctgtcacccaggctggagtacggtggcgcgatcttgactcactgcaacctccacctcccaggttcaagcctcctgagtagctgggattataggcacccaccactacaccaggctaatgtttgtatttttagtagagacggggtttcgccttgttggccaggctggtctcgaactcctgacctcaggtgatccgcccgcctcggcctcccaaagtgctgggattacaggcatgagccaccgcacctggccctggtcatgttatttctagagctgtttgtttgtttgctcctgatccggattcggtctgccattgagctcgtagtctccttgtgggtccctgttaatcggggagtccctcagcctctgtcacctccgttacctggtcgcttctggggggtgcagcccatcagctgcagtcgggcctccgtgtgggacaggatttcctcatgatgagccttggggagcctcggaggagactctgcagtgccccagggtgtggactgccccttcctgatgacgctgacttgactcactgggttagggggatctgtaggttcctctgttggatgggcacctcttcctttttataaccaagaaatgcccttttcccacttattgtgaggagcctgccttagttccgcacaatgtaggcagagggaggatgcatgctcttcatcctcttcatctccccgaaggtgtccaggtgccagcaccccagcccggcctgctggggagggggctgcatcagccaggggctgtggtgagagggtgggcaggacagagatgggctccgagcaggggagcctgggcagcagggagaagactggggagctgaggggctgccagtgcaaaggccccaagccagctgctgaggtgggtgtggccctggccagggaggctgaggtgtcaatacaggggtctctcctgggcttggtgcttctgaaagggccttctagctgtaagcagcagtgagggcacaggaagggatggtggcttcagggtggcctattcagggccccagtgagccatgggagggcgggagtttccccgttcacccagcatggccactccggcccctgccctagagggccaggaagctcagccataggggctggggcagctcaatcaagggccctgccctggaagggtccaggcctgcagcccagcccccaactccagccccgagcacctgcctccagcccatggtgcagggcctgggcccctctgccgcacccaggccagactcaggcaggtggagctgggtccctcaccacgcatgcctcagcgctctcctctcctcctggggtctcctgccctgaagagagggttgggagtgtgggtggatttaggggcgcccagggggcagcacctgatgggcagggggtgctctccgggaagatggagagagcagagccacccccgaggcaggaggggtctgcgggatgggaggggcctctgtgatgagggctgactgcagggacagggaagggggtagggcaagtgcctttcattctcaactttttggaggtatgtggtctctgtcctccctcagcttcgggatgtaatccctgcgtttcagaccccagggtcagttgtacacacctgcaggcgtcattctctctgtcacagacccgcttgggtgggcacccatgtgagttctctgtctcagtagctgggcctggtcctaccccttccgggggtgtggctctatcccagctcggtcctgcctgggtctctttccctctctgagcgcctcagcagcccactaggtcgggcactggtgccctgggggcattgctctgtgcctactcgcccccacagggagctgaaacacagctgctgccaatgggatgtgtccacctggcaggcgtgggccccttctcggcagtccacccggccacaccgttcccgggcaggcgtgggccccttctccgcagtccacccggccataccattcccgggcaggcgtgggccccttctcggcagtccacctggccatactgctcccaggcaggcatgggcctcggcagcttcaggaagagccccactgctgcccaggaggagcctgtagctgatgctgggtgctcaccattcctgctcatgtacataagagagcaggggcaaaatctaaaagtccacacagcatgagacaaaccaggggctggccgtcaacaccggtgtgcaggccactacgcggcaaggtgctgagaacctcgtggggtctgcgtccggaggcaggtgggtggtggctctgggtgggctacaggctgtgaggggatctggggtgtggaggggttgctctagactcactgttctgagggaacacacctgtaatcccagcacttttgggggccgaggcaggcagatcacttgaggtcaggagttcaagaccagcctggccaacatggcaaaacccggtctctactaaaaatacaaaaaaattagctgggcatggtggtccacgcctgtaatcccagctacttgggaggctgaggtgggcaaattacttgaacccggggaggggcagaggttgtagtgaggtgatattgagccactgcactccagcctgggtggcagagtgagactccatctcaaaaaaataaataaataaaataaataaaacaatgcccatgtattgagcatgtggcatgtgtcaggtgctgtgtgacacatctgctgcagtaacatttaatgtaaagtaataacagaaatatgctgcattgtatgaaacacatagtgtaatataaatgcattatatattagaaaattatatagaataataaacatctacagcctgacattcatatgttaaaaagattagaataataaaaataattggtatttttttcaggaaaaataatataaaataatcacacaaactaatataaaagcagttaatactttgactcatttaatccttaactccccagttcttctgaagttgggggccagcgaggaccctctgtggtgactctctgtctgaatgcaccaagactgagctcggggcccagccacgcaggatctgagcagtgtggcccagagcggcggcgggcgggccagaggggttactcacggccactaggatccaaaagaacgtcactgagaggtgtgggcctgaaactgagtcatccacgttcagggcaatgatccccccgaggacggcagagatgcctgcgattacctcgacgacctggaggggacaggacagcatcggctcataaggaagtggagacacccccagattcccagaatgcactgtgcagacatggacccccaggagcagggtccagtgggctggccccagatctaaccgtggaggagcccacctggatggacccccagcctcacctggcccagaccccctctgccctcagctgcggcttttcacgtccctcctggagtaaaatagccaaagaggtgtttcccccactgctgcttttgtccacagaaactgagggtattgacctgacagtggtgagggcagaaaaccaagaccctcagactcccttccctgtctcacagtgtggcaggcggcggtgctcagaccctggaccccatcgaagggactcgggaaaacaggcctggggcagaagtagcttcccataggacacacccacccgtgccatgtgggtttgccattgccacggcaacactggacgtcaccacccctttccgtggcaatgatccaaccacctggacgttagcaccccttttctagaaatttctgcataatctgccccttaattagcatatacttaaaagtgggtataaataggaggcagagctgtctctgagctgctgctcgaggcacctgccggttggagagccctgctatactgccactgcaaacaaagctgctgtctgtcacctccagctcgcccttgaattctttcctggacaaagccaagaaccctgctggcctaagccctggttgtggactcatctgcccggcaccatcagggccgcaaccagcaccgccagactcagggaggggccgcaaccagcaccgccagactcagggaggggccgcaaccagcaccgccagactcagggaggggccgcaaccagcaccgccagactcagggagggctggggaagaaacacacgcccgaaaacctgctcccgtgaaggatctctgtgagtcgcaaacacagagctgtggccagcaggaaagccaggcataaggagtgggccagcaagggcttgggggccggaagggacctgggcagccaggccttgcgtccagaaggcacaaaactccagatgcacaaataaagctgaattcccagccaggcacggcggctcatgcctgtaatcctagcactttgggaggccgaggcagacggatcgtgaggtcaggagtttgagtacagcctggccaacatggtaaaccccgtctctactaaaaataacaaaaattagctgggcgtggtggcgggcacctgtaatcccagctactcgggaggctgaggcgggagaatcgcttcaactcaggaggcagaggttgcagtgaaccaagatcacaccactgcactctagcctgggcaacagcaggactccatctcaaaaaaaaaggaaaaaaaaaaaagaagcagaacggaaatggaacctaagagaggactgaaatgctaaataaggggaagtgaaggcactgggaaacacacacagacacagtcaagcacacaggaggctgtcccattgttggagtaaaaaggcaaaatgtcactaaatgtcacaagctagacaacaaggccaaggcggagggaagggggacagaccccgcatggtctgtttatcaaggagcgtattagaatatgaagggcaacccccaaaagaatactgaaaaatttcccatccaaaattagagggaaaaggaaggacggagcctctgccaattcaaaagaaggcagggaaggagggaaaaaggcaaaatcagggaaaatggaaaactcaaaagatggtaaaaataagtagaaatttatcagtaataactctcagaggaaatgggctacattcaaaaagctagggagagagaatgacaagataaagaacaaaatacagttacgtgctgcttataacaattataccaaagtacaaggcaagaaaagttgaaagtaagaaggagaaagaggccaggtgcggtggctcacacctgtaatcccagcactttggaaggcctgggtgggtggatcacttgaggtcaggagttcgagaccagcctggccaacatgccgaaaccctgcctctactaaaaataaaataattagccgggcgtggtggcatgtgcctgtagtcccagctcctcaggaggctgaggcaggagaattacttgaacctgggaggcagaggtggcggtgagctgagatagcaccactgcaccccagcctggctgatggagtgagactccgtctcaaaaaaaaaaaaaaaattcctcggggacaacagtgtcaactcacctacggcagtaacaaactccccctaaaaattacaggacaccagcagcacctttcgcgataaggaaggttattaccaatgataccaataacagactagagtctccacagatgaggcgcacgccgccatgcggtgtagacagccaactcttcgccaactcggaatcgaaacgtgacgtttaatccagcctcagtcacccccgacagagtatgagagaaaagagaaagaagggaagttttcttactgagtaagatttcaggacccgagcaggaaatggcacttcgtccagaatgttggcgctgtcagacatggagccctacgaagaaacagaactgtcaccccgggtgcacgggcacagggactcagcactgccgctggcatccggccgccgtgggcagtgggtcaggtcagcctgccgtgtagatgcgagaccgccttggaggcgcccgtggatctttgggcttgaggaaatgttcacacacattgtccttgcatatgaaaattagcagatgtggtgtctcctggtgatcccctggggacgagcactggactgagtcaggcttagggggaggggagggtacagcatctgtcttcacctccctgtagccagcggccgccaacccctcacccagctccagagcccctcctggccggggtttctgagacccaggagagaggggtctcatgggaatgccctggagcagcccagatcggccctccgagggtgacgctgagacccacctcgctcaccctggggtgatgcctctgcaccccctgccctgcggggtcagaagctgcacccaccttctttttcttgcagtcctcctcgctggaccgtgcagcgatgatcaccgtggccgccatgagcagctccagcaggagcagcaggatgaggttgaagttgatctgccaaggggcacacacgcttcagcaccgggcccgcctttctcacgccaccgcgcttcagcgtccaccggaccacctcacgggcaggctgcgcaggactctcagccacggtccccacttttcccatccagggccagctgtgaggcactgtgggctgcacactctcctgcctcacatgggcctttggggtcttttagtttttaaaaccattcttagtgcaaaggctgtacaaacacaggccagggctggatttggccttgggctctggtctaccgaccccattctgaacgctccttgttcccacaaaagccttcacggaatgtttagagtagcttcatgcatgattgtcaagcactgagaacataaggttttttggagggtaatgaaacgactgcaggccctgaccgtattggcagtgacatgaatttatatgtgtgttaatattcatagaagcatacattttaaaaagtcagtgtagctgtctgacaattttttttttttttttgagacggaggttcgctcttgttgcccaggctggagagcaaatggcgcaatctcggctcaccgcaacctctgcctcctgggttcaaatgattgtcctgcctcagcctcccgagtaagctggggttacaggcacctaccagcacgcccggctaattttgtatttttagtagagaggggtttctccatgttggtcaggctggtctcgaactcctgacctcaggtgttccgcccacctcggcctcccaaagtgctgagattacaggcgtgagccaccgcgcccggcctgacaatttttaaaatacatttaaaaaagaaagagtgcagaaccacattcaactaaaaacagagcctcgaaatatatgatgtcataacagagccacaggaagatgtagatatatcagtagaggtggggaaggacttgaaacacttttcttagaaactgacagatcaggcagagggaggcggctcacgcctgtgatcccagcactttgggggaccgaggcggttggatcacctgaggtcaggagttccagaccagcctgaccaacatggtgaaaccccttgtctactaaaaatacaaaaatcagctgggtacggtggcgcacgcctgtaatcccagctactcgggaggctgagacaggagaattgcttgaacccgagaggcggaggttgccgtgagccgagatggagccactgcactccagtctgggcgacagagcgagactgtctcaaaaaaaaaaaaaaatgacagatcaaaaagacaaaagcataaggagaactctaaaattcagaaaagtgtgacattaaccttgtcttttattttctgtatttctggtgctttgacctctggctccttcctgatcctgaagagacagctcctcccagggccagccgacagctacagtgagtaacttgcctctgagcagttcagatacaagccactgacccagggaccacaccccatctgctctccgtcttaataaagaagcgtcacaggccgggcgcggtggctcatacctgtaatcccagcactatgggaggccgaggtggatggatcacctgaggtcaggagtacaaggccagcctggccaacatggtgaaaccttgtctgtactaaaaatacaaaaattagccgagtgtggtggcacacgcctgtaatcccagctactccagaggctgaggcaggagaattgcttgaacccgggaggtagaggttgcagtgagccgagatggcgccactacactccagcctgggcgacagagcgagattccttctcaaaaacaaaacaaaacaaaacaaaaaggcagtgtgggtgttcccactgggtcctcctgtgtctgctcatttttcctgcccaacgagagtggccaggacatactcaagcctcctccagctttccccaatcatcaagtgcattccacatgtcacacaaagcaggaggccctccttgcagtatctcggatgaggtcctggtttcctttgggatttttgtctttttttttttttttttttttttgagacggagtcttgctctgtcttccaggctggagtgcagtggcgccatctcggctcccacaacctctgccccctacaatttcacatttttgtttagaggtgcattgaacaactgtcttacacagattggatgaaacatagtattatgtcactgttaatttttaaggactgttggaaaagacattgtttaccaataaatctgtcccgcagaatcacgagacttcaataaagacaattattttctttggatgcataaatctctcaactttagtcaaactcacgagctgtgaataacatttaccacctatttccagctcaacaaacatttgctgacaccattcgtgggagtggggctgtgggtgtcaggcgtctgcgcgaagctcgtgtgaactcacgtttattgctgatgggttcaggactagtttgcatccaaaccaaattaaacacgtagtggtcacagcaaacgtggaaacaaacaatatctgaaagttgggaatctgaaaaacaaggcaggaggggttttccttctttgaataataaaagaaaaaaggtaacagataaaccacacttcaggccattcactaaaaattatcctgattaggacataatggtggggagtcctgcgtgctcagcccgctctcccctctgtgcggcaaaggctgggctgggcaggagctttactgtctggggggcaacctcgggggcccctctcggtgccacaacgtctgtgcgtgggcacacacacaagcacacatgggcacactgtctgtcagcccctccggctttctccctggcagaggctgcctgcaagctagactcaccacattggcgttcctcctggagacggtgaagctcacaattgccgaggggatgcactggaatgaaaccggaatcccatgagcctgccgctcacctgagcaactgagactctgaaatactctaacatttgcgcttccagaaggatctgaatcatattcacaaaacagtgttgccagtccatgcaacacagtgggttggcttgactagaaggcccccaggtacttctcagttttaattttttcttgagatggggtctcactctgttgcccaagctgatcttaactttgggctcaaatgatctgttcacctcagcttcccaaagccctgcgattacaggcatgagccgctgcgcccaacccccaggtacttcaaaataatttattctgaaagaagtttttatttttctgatgtgctaaaaagatatttgttaatgaaggctcttctagctggataagctttgaagcctagaatgtaactcacgcaggcacaagacctggtctttgctgaaaattacccaaaaaaggaaaaagtatcagccgggtgcagtggctcacacctctagtcccaactactccggaggctgagctgggaggatctcttgagcccaggagttcgaggctgcagtgagctgtgaatactcggtgatagagtgagaccttgtctcaaaaaaagaaagaaagaaagaaagaaagaaagaaagaaagaaagaaagaaagaggaggtctggtgcagtggctcacacctgtaatcccagtactttgggaggctgaggcgggtggatcagagtcaggagtttgagaccagcctggccaacatagtgaaaccccatctctactaaaaatacaaaaaaaattagctgggcgtggtggcgggtgcctgtagtcccagctactcaggaggctgaggcaggagaattgcttgaacccaggaggtggaggttgcagtgagcagagacggcgccattgcactccagcctgtgtgacagagcaagactccgtcaaagaaagaaagaaagaaaaaaagaaagaaagaaagaggaaggaaggagcaaaggaagtagcaagactctgcatgtgagggaggcagaaaggagtcccacagccttcttgtcctcagccttcttgtccccacagggccacaccaaggctaggagtccagggccagggagggaggttgggacgtcagggacagggaggtggatggagtcgggccagcccaggcctgtggcccttgccgtgcagggccttgctcctgcagccatgggaccccgggccctgagtcgggggtgcaggccctgaggggctgagcacagcagtgctgggtgaggaggcagaagaagccccgtcggggcctgagcgaggggcagagctagggccaggacagccaggctcagctcagcacccactcaggtgccacgagggcccagggtagagaagaaaggccgggggcagggccgagtggggccaaggctgggcgggggtgggcacttgcccatatccggcagccgctgaggctgaaggggcacagctcacagctccactgggacaagggcggctcccatggtgaggataaaggccacggagaagcttccagagagggcagcagagtgggacgggtcacctgccccaaagggctttgttctaagggagcagagacccaggacagcacggggcggggcatccactttgtttttaagacatttcgggggcgctgctggggacagtcaccaacagtgtccctagagaaagggcaggggccagagacccagcaggcatgtggaagcgagaggaggggagagctcgggaccagctgaagcaggaggggcgtggggtccgcggcttgcgggccagaggggcatggggtccgcggcttgcgggccagaggggcatggggtgcgcggcttgcgggccagaggggcatggggtccatggcttgcgggccagagcccaggggtcagccagcatggtgctctagctgccgggacgctggggaggcagtggccggggttcacagaggaccaggggacagcggttgtctgtcctcccttgctctgaggatcagtgggtgcctccaccggccttggcactgtgtaagtttctaaaaacacaacatgaagctttgggaggatgtggggcacaggtcccagtcccctgagggcagatgctgccagctctggcaggacgcagccgcaggctcagaatcaacacgcaattccctgcacaggcgtctgcagagcaaggttcaggcctgcttcatcagtaattctcaaaggtgatgaactctacgtgaaactaaagtcatatgaagagttttttgtttttttcttgttgttgttgttttgagacgaagtttcactctcattgcccaggctggagtgcagtggcacaatctgggctcactgcaacctccgcctcccaggttcaagcgattctcctgcctcagcctcctgagtagctgggagtacaggcacccaccaccgcgcccagctaatttttgtatttttagtagagatggggtttgtccatgttggtcagactggtctcaaacacctgacctcaggtgatccacccacctccacccctcaaagtgctggcatgacagccatgagccactgtgcccggcccatatgaagaggtttgaatgaggtacaggtgacagaaacctgcacatctcagaacaaagaaaccagagcacgtgccggcgagcttgggcactggcagaggcgtggaggaagctgcttacagagcctgcagcacagcgcaagtaatccatctcagccgggaacacgttccccaggtacagcgaaaaccccgaggtcaccaggaggcagctctgcaagacagcgacagaatcccaggttacaacgcgccccgtccccaggctggaccctgacccttcaacttctgcttcactgtctgtgtattggtgactcacccacgtcccccagcatcaaccacacccgcacctgggacccgcccatcctggactcctcctgtaggacagacgcagccccgccgcagcccaggacatggaccagcctcccccagccatgtcggagcatggaccccccacgctgttatctggaggagagaagaaaggggatctgccaatatttagagcaaggaatggcacctctccccacaaaatactcctgccccaacatgttgtgcgtgcagtcttccagatcccacacccaggtccagacacgagactggaaaacaactgcccatccccctccgtctgcagaacctaatttccagatctggaagaagatccctccaggcaggggctccaggcccaggggctcctgagcagggaagaccctagcaggaggcagggagggtgctctctctcacgcacagcactgcaggggtgcggtggggagggggctctctctcacgcacagcacccccggggtgagtctgaggggagtcagtatcaaaggtcactgggacccagggtcctggcagaggaagcgaggtctggggcagaggggatctggcctgggcgggggaggggctgcgaccaagtccagggcaccaggtggaggagggcagagcccggagatggccaccaccacccgggagccgcctctgtccccagctccgaggcagacgcctgtcttggtggggcatgctcaggccacgggaggtgggcaggaccactgtgggtgctgcaggggctgccggcggaggccagggcacagggaggggagaaatcacagcctggatctcattctcagcccaagctacacggaaccgggggtccctgcatagaggcctgtcctgcagcatggctctgagcagctgcacacactcaggcccaagtggctcctccaatcatctctgtgcccacgactgtgcagggaatggccaggaccccagggaaatccctcggacatctggcgctgcccgtccaccccagacctgttcctttgttccccagctccctcccagccggcccctgaggccctccctaggaggaggaggtccctgaggttctctctgtgagggccgacctgaaggcctgagacgcctcctcccacctttgcaggtgacccctcagaggaccctgggcccccagagccgagggtcatggagactcctggggcccattcatggccctgggactgtccctaccctggtgggactaagccacaacctggagcagctcaaggctggcacaacagacacccataaattaataaaaataattgtgaaaacacaagcaaaacaagctcgtcggcatccaagagttctgcagcagcagggttagtctgagagttgctctctctgtcccacctggggctccagggcgctgcagtccgtcaccagagggaccagatgctcgtggccctccaagggcttagtgtggagctactcacccccatcagcacagagaagacccacgtcttgtggctgaagcaggggggcagtctcttcgacagctgcaggtcgctcggcttcgcgtctggggcatagctggcggggtcttgccggccccgctccagcgtgggcatccggtcataggccagctcctctctgaatggctcctgggtcatggcacttggggacaccacagctgtgctgaatgtacagccacgtgtcaccagttctttatctggaataaaattatcatcggctttggccactctgaggaaacttcaataagttgtttccaagaaatattttttaacaaaagaaatattgttcatactgaagtgctctaaatttgaagaagaaaatgagcacttgaatctaaaagtgaaaaagaaataactttcctagaaaaacggacctgaatagtctgggttcagggtgagattctacactttaaatgcctcattgatccatctgggccctccaggtgcaacacctgacaacatccatcggcaacttcgtccatgaacacatcacgccggggactcaagcacgttaaactgctccaattggtagctaaacgagagattgcaaaacatgcctctactcaacggcttaatgtctgagcacttacctcccccgctgctctgccgttgggagcactggtctctgggtgagggacttccagcaagaagtattcacaaatgaaacaaaagctcagcaaacttgagctgaaggcaggggaaggagagctgcttcctgaatatcaatgaggggaggaatcgggtggatcgtagaaatgtttcgtgttggttgtgtaaaccactgcctcgg

SEQ ID NO: 814 - DNA, 7029 bp, Homo sapiens
ccaccaccggccacctgagtgtccgtgagcgggccgaggcgctcatcaggtccagcctgggctcctccaccagctccaccctgagcttcctcttcggcaagaggagcttttccagcgcgctcgtcatttccggactctctgctgcggaggggggcaataccagtgacacccagtcatccagcagcgtcaacatcgtgatgggcccctcagccagggctgccagccaggccactcgggtaaggggctgggcagggctcaccaggacaggctgggatggtggcacgggctcctggcctgagcgtggcacctgccttgcgttcccacccttctgcctgcagaaccccatccccttctctatggggctcccagagtgacaaaggacagtgattagacacgaagtggcttagctgctcttgaaagcagacaagatacagagcagatatcctgtaaacgataatgcccaggcaggcactgaaaggagtcaccggatacagaggttctgcagaactgtggccatctgccctacaccggggcatgacggagaatgccctccacccattcacacagcaggactcttctcacatgattctggcctgagggagaggaaaggacacctgtcaatgctggagttagagcttcactgcttctcagccaatcgatttgactttaaagctgctgagatggcccactgcttttaggtatttaaatactagacaaggagagttctaaggacttcacccaaataagctgttacttgtccagaatcccaaaccagctgagatgaaatgaatacttgagcttcttcagtgagaaaaaagtaaataaatacccagcagtgctcctatgtgacctggtagacagggaaaatcgatggtgtcaaggcaaaaatgggtcaggtttggagagttcccccactccttttgagtgttcaggttttccttaccatggctcatgctttccatcaagcaccagagttgcagtggcttggcctctggttctgggtgaggttatttgcaggtggagacggggggctgcacctgaacatttctagtgtcaccctccctctccttcatgggaaacagctctccagggaagtaccttcctgccaggggaagccaaggctgggccggccgccctacaaggagccacaggattgcagccatgggtgccacctttcatggaaggggagatttatgggctttcctggaacccccaggctgtcctggccaagaggaaagaggtggttacttcaggagtttgaccttagttagataactaaaagaatacatttcccctcccttttctttatttcctcaataaaaatgtacaaagtatcacccttctccatgccccaatctgtgttaaagtcacaatctatgggtgtagttctgggattctgtcaaattctccttcctgctctccaaaatggacaattgtcgtagggaccacatgcccccagaatacaatggcctctgtgttctactggggtcaagcctgctagaactcagcattcatgacaggggctaagtgtgcatgaagtgacactgactacagctagaaagccaggcgcacaaatgccccttccccccagggccgctctttccagcgcagtcatccagaaaggcccacgtgcagagcccctgtgtctcagatgctgcttcagttgcccgtcctgtcctcagaggccactgtgctggccctctatcatttgacctgactttagaacctgacctcaaggatatggcagcgctagcctttagctcccacagcacggatgggggtgatgccagttagaagtgggtagtgaacgtttgctgagctgttcactgtttctctcttctctttggaagcacctctccgagccatgtgagccccctgatgccaccgagcaggggcagcttcatgaccgatgtctggctgaggctgtggcggacactctcggggttgtctgcaggagagcaagccaggaggacatgggcctggacgacacggcctcgcagcaaagtgtgtcagacgagcagtgacgggcgtgcggccgggcggggaggctggctcccccacacctcccacctgcattgctctccctcgtgctccccaaatcaccacaaccaaccaataccgcgatccatgagggactcctcctgtggaaaaggagagctgttccagaacacagaactgatctcaggtttttgaaaaaaaaaaaaaaaaaaaaaaaaaaatcaaacaacaacaacaaaaaaacctcacatgatggggaaacaaaaaaaagcaacaaagaagccacaccacacctccctggccaggcacagcgctgcccagagcggcacaccgcggacagcaccacacatgttccagaatctgaaatctcaaaagccattcactaacttaaaacaactcaacagagccatgaaacaaatgccctgatgaaaataagacaactgcatgttacatcatcggcactttatacattactgttaccatgaaaaagaaatgaacagcagcacgtctgataccatcagctgggcagatgcattaaggttaaatctaagtgtcaagaaaaccctatttctttataatatttatgcagctgttaagcgtaacatggtggcagcttcacaacaagaaccgtgatcatgcatgcagtcatgtctccagtattctgtgaaaagccaggatacgttaggatgtgagtttagaaactgagtccattcggtgcatggaaatccaccgcggagtcacacaatgctcctcactgtagtccaggcgattggtgggccgccagcaccctgcgggcttcacagggacgcgtgcttgttctccaagccccgcaacccttactgtgcacacaacatcgcacacacctttgtttttgaaattaaaatgtttatagttattgctgcgtccagtgttttgagttatactgaagcttctcatttctacaagtatatcttttatggtgagaacgacatttgggtaaattctgagacaacttttcccatcttcaagaccccaggaacctgtatccttgctggggtagaggtcccaaaatgcagtccatagagtatcactggcctggtgaaccatcccttttcaaaagacaatagttagaaggaaatactcaattttaaacagtcacacaaatttcttcaaagtatttaggatttggaaatttgaggagagggttgggggaagggtattgtagagaatctcttgccccttggaaagtaaatggtaatgcttttctaatttttttttttgtaaactaagaatcagcaattaataaaagcaagtgtactctataatcacagacagaaggttcttattttcaggtcagcactccctagaggtgcaaactttatttaatttaaatgcagttgtttgtctaatgggaagctgatagggccttgctgcagttctctaaggtggccaaattaaacttggctggcagctcctgtaatcctcttgggcaactttacagccaagccccaagggctaaatggcaggcctggagctgtgagtgtggcctccccacggagggtgactccttgagttcagtgaggaaaaccacggtgcctggcagtggtcagccaggagtatgactggccactccttaggcatccagaagtaggaaacacagaaagcattccacaaaacggggaatctccccaaagagctagaaacccaggctggaaggaaatggcagcgcaggcaagagagcaagagcaccctgggtgctcctccatcccgtttctctggggaggttcatgaggtgcttcttcaacagttattctgttcattgcttatcacagttcacgagttctcgtggcatcttttgtggggaggagggaggatgaaagtgacacagtgtatctacaacactaaggtcacattaatcagataggaatgcagtgacgctctgcaccgtctatgagagcgggcatctcgagtgtgcataccgaggcacagatgtgcacacacatccgcaggcaactgcacccacagagaaaaggtggcagtattggagtcaccccaggattcttgggggctgtttgaccagccatcaacagtgcagccatacttctttttcttttttatcgtggtacacaacttttatatttacaactcatgaacttgttaatctggtccttcatctagtcagctatgtatcagaaaggacttcctgcaaaatgttatattctaagcccccatttagaggaggcatccctaaactgacatttcttgctagagttgttcaaatattctgccagtatatagctaaagagttattttccagttcaagagttatttgggggctgggcacggtggctcacgcctgtaatcccagcacttttgtaggctgaggcaggcaaatcatgaggtcaggagttcgagaccagcttggccaacatggtgaaaccccgtctctactaaaaatacaaaaaattagctgggcgtggtggcgggtgcctgtaatcccagctactcaggaggttgaggcaggagaatcgcttgaacccaggaggcggaggttacagtgagccgagatagcaccactgcactccagctcaagcgacagagtgagactctgtctcaaaaaaaaaaaaaaaaaaaagagttatttggacacagatcaaaatggtttctcctctaaagataatattaaaaccatagcacttggttttatataaatcatgtggccaatttggcattattgattctaaattttgcagtgtgttgaaatcatctggcaagtaatttgttaaaatcatgcgatgcttcaacttctttgcccacaaaatgtgcaatgcaatgcctgtttacttagcccacccgtctccagcctcatctaccatgctgttttgtcccaagtcactatgctacacaagcatccgccatcagcacacacacaggtgtgatccacagacacaaccttctatgaatacggtaattggcaggaaaagaagaggagcaggtctgttccacattttccagcccaccagcgttcccacccccttgataactggagggctgggaactgagtgcctgaatttgcagctttactaggatctctccctgtcaaggctgatcatcagagatgacactatccatttaaaagactcacccatctccctgcatgtgcttaccctcactgagaggtaagaagaaacaatttattaaactattacgtgttaagcagctggcggtatgatctgctaaggaggaaaaggaaagaatgatttagtaaatcgtgcttcaaatcagtcctgattcctcccatccgaccttgttattctagctgagattcttcatataagcaatacatgttaattctgtgcttttcaaattgaattcctccctgagactcatatccaaccatctgttagatattttgctttgtttgaataggaggcattccaaactcaggtataagagaatccctgacttcaatctgccctgctgcccccaccccaccatccggcaagagctcctcacctcagccgtggcaccgacagggaggtggcgctcagctctgctcctctcatcctggctgcgtgcagggaggggacggtcacgtggagttctgccacggcacctcttcttcctttaaatctcagcatgacactgttgctacaggctgtgtgcgtttggccctgagttctagttatctgtgaattcatcttatccttcattaaatgtcattgccttacaatacagggattgcatctgacatctccatacatgctccatgatcattctgtttgactaatacaacaatcatttcaggacctcaccacaagagacactaaacgttctttggatttacagcagtttatcactgctaaatgtcaactctgaggtctgggggcacaaaacacactaaaaatgctaaagcctcaagaaggacgcagcagggagtgatgaaagagtgaactttggagccacgcagacgtgggttcaaatctcctttgtcaccgctatcactgtgctcctgaacgaaccacttaaacactccaagcttgtctctttaccgttaaagggaaagtgtgcagaagctcccgcagccccaagtgctaggggccaccctgaatctgttccacacaagtgcatactttcaagtaggcagtgacactcccaccccacataagcacaactggcttcagtgataagcccctcagactagctatttaactttgaaataaccttcaccagctttctttctcatttaagacaaaatcaaagtctacaaaacagacacggctgaaacaccaagctcaaaaggacaagcaccagaaggaacatggcccttggtgtttcagatgcatgaagggcggaaacgcaaaacggcctcccggaggtgccaggaaaggctccatcttgatggggtcccactccagctggggctgaccagctccaccacgcctgggtgcacattgatgacatttccccagcctgcctccctatctcttggttctcctgagggctgtggtactttcagatttacggccaggatcaggttcccaggcctttgtgggaagcctctacccaactcagaggccgtgcctctcctggcccactgaggcatgcagcccacaccggtgtcctggtgatggtggctggaagtcacagccagcctgccagacatcctgagctcggaactcagtctccctgaacagccccgccaggcagggactgtggaaggagatgcccacttcctcctcctgggcaggtagcccttttgagggcttagttcataatctattaggcctccctgttgtggtccctccaaggctaggcaagtccaagtcaagcttcacaaagttacctcggaagaaaagcgctgaggaaagagacactgatggaggaaccagacctgggctgcgtgccattttggttttgatgtgagcccctcccgccccattcactgtgccccagtgcccagcccagggctcctcacccgccacatgcccgacttgtccacagttagagagaaggcacactgctgcttataccagtgggtttgtagccaat

SEQ ID NO: 815 - DNA, 28215 bp, Homo sapiens
tcctgtctgtaaccatcagatttatttttatatttattaagcagtaagcaaacagagttgggggagatgacctaaaatggttttcttttggaataatattttttaaaaaatcaaataactgttatcactttaagttgcatgaggctgaagctgcacctggagaggaatttaattttcatgacatgcaaaactgattaggcagtgaactctttcctcccgcttcccctgaacacatttataaacttcaacgggggtgaattccatctaatactctgaaaaccatttctcatctcacagtttacccaaatcatgtgcatgactgcaagaggaaataaacaagaaatctttaagcatagataagccacaatggatagttaatcttgtacagacaatccagcattaaggctaatttgatcttttaaacattttatgggaaacagctgttgagttttctctagaaaagcccacaaggttccataaccccataggcatacagcctcgacaggcagggctccatcaggctcctcttgaactgggcactccttcacggaaggcaggaatgcacgtgtcttcacttcctgctgctctgcacgcacgtcacgatatctggcagaaggtggtttctgttttccttggtgacctgtgggaagaagtgagagaacaggcttcagagctcctttcctcttcttcaatcttgtgctaggtaactctctaaaagaaacgcctggaaggctgggagagggtgaggtatgttttgttacccaggcaggaggcccagctcttcaggagcactcagaaacaggacaggaatcaccgagtcccagcatcagtttctgccaagtgacagctcaaaaagtcaaagtgggtttggagcccagacagatttcagccaaccatggggagagctgtgaagtgagtccgacgaggcacaccgggacggatgatgggcacacaggacccctgagcacgacctgtcctgaatggaaggaactcaactgttggagtgaagcgaggaggagagcctgggagccagcggggcccaggagggcacccagcagagcagcagtgaagcgcccaggattctgggatgctcagtcatctacccgcctctccacaaacatcaagtgctcatttgaaacatggagaagtgggagagccagagacgtgagggtgcctccgtacagactgttactcaggcctcctgactgcagtgtgttctccaacacttacaccattacaaaatcaaacaaaagcaacaaagagttcaccagagctttacccgatgatctgtttatttttctttcactaccacaccatcccgagtgccccagggtaaaggaagggccatctctgctcccatcacagtgccttcctacttggcccatataatatccatccactcaacacacgctgatggggtggaagggcaaacaggagccaggcacagagatgcgcatagagaagcaccacaggtaaggaccctgacctcatggagctcgcagaccaggacaggacaggcatgaacaaggacaatgaaggagtctggggggcaggcaggaacaggggcatgtgtggggtcaggggcaggaaaggcttccaggggtgcttaagcctggatgtaatttcgacaggtgaaccatggaaaaggggctgagccaaggttcccggtaagagcagggagtgcatgtggaagccttctgaggttcagggtggttgtatctgaagagggggcctggcatacaataggtgccaatacatgtctgaagaggagatgcagagcggacctcgtcaattctggttcctggcacctgctcacccttcttggaagagtgctctggttgtctttaggagactgtacggtctaggaaacttgcccccagccaacaagtgggcaagccaggccctggcaacttctctgagatctgtaccccaagaggagtgactgagatctgcaccccaagaggagtgagctcacgcagcaagtgccagaagctgatcccatttctactggtcctggctgcgtcaatcccgtgatcccatttctactggtcctggctgcgtcagtcccgtgatcccatttctaccggtcctggctgcgtcaatcctgtgatcccatttctactggtcctggctgcgtcaatcctgggcggctgtggctccacttgaaatgaggacagtcagcttttcctttggcttcatgggacagctccaaagcctataaggctttttgatgctgttttcacttaagttagccaaagtccattcctgttgtttgcattcaaggaatccacctgaggtagaaaggaggcgacacagaggtgggcaccacaggggcccttttcttccactctgagttcagcagtgattgcagtagcttctgcctccagccaggctctgtgagagtggactgtgatacacagctggagaatttgctctggtcttctatgacacagtacggtgactacagagtaaataacaaggtagtgtatatttcaagatagctagaagagaagattttgaatgtcatcaccacaaaaatgataatttaaagtgacagatatggaaattaccctgatttgatcattatacaatgtatacatgcactgaaacatcacactgtaccccataaatatgtacattatatcaattacaaattaaaaattaatttgaaaattgagcagaatgcaaacactccaatattaatattttgatactccctttgatttccctaagattatttctgaaaattatgcaataaaatgttgatgtgcaactctctgcagtattcacttatgatattccctgttgagaaaagcacactcccaaatgcaagaacaaggatcacagcatctgccaacctcaggagtctttgccttatgtgaaattctagtctactttttattcaacagccagaattttggttgcagaaagcctttcctgagaagctaattagaagagggaactgggagctgggagcaggaaaaggaaataaagaagactgcagaaagaagaaagtaatcccaaccattctttttttctgcactggagccttaagagaaagaaaggaagctgagtgaacctgaacccttgcacctgcccagtggctgtaggggggcccttggtaagaatttatcctgggcacagtgaagataagactgtgagcaccatggggtcagaggccacatctcattcatcctgtgacctccagatccaatcccttgcttattaggaatgttgggggcccttcccacagtttcaaggaaatgcatgtggttttgttttgctttcttgcacatagttgtatactaagaggcatttcttcccctgcctgctccatccatgttttcaggtctggggttgttaaagtcagaacataagcaggacccagtatctggtactgcatctgtgcccagcagatgagtcaagtactgtctctcgccgtacctaggccaaccagatgagaagacaaatttgtgatatcaccacctcaacttcttatttaaacaatcaagaagcgggaaggggagactgagcagggcatacagacactgatcatattaaacaagttagaaggcagtgaggtagcatgcaagcagcctggaagatcagataatatccactcactgctgccaagaacatgtgcaccccaaggtctaaacaagaggcttagtcatactatgaagctgccagcttgaaaaagaactaaagttgttgataacattttcaatgttatgacattaactagaaggcagcaaaatcaatcaatgacacactcattgggatacaatgggataaaactcaatgggatacaatggtaataacctcttagagttctgaaaaacaaattattgaagaacccataagtcacctgctatgatttgactgtgtcccccacatttcatgtgttggaaacttaacccccatgcaaatagaggtgggacctttaagaggtgattaggtcatgggggcagccctcatgaatggattaatgccattatagtgggagggagtgagttatggcaggactgggttactgataaaatgatgtctggttctccctctctattgttcactgctaaaactccagtggatagaacagtacctgacatacagtgcgtgctcaatatttaccaaatagatgaataaaaatactccatcaccaatttcttctactgatgctttactaggtaataggaggtgccaaagattgtatcagtgagattttattttccttctcaggtactgttctttcttttcttttttcagctattttttttaacacatcagagaatgttatcgttttgcctcaactgtcaaacataattcttcaaaagtcaacagaggaagaaaagcccactacactcactcagagttttactcttcccattgttctttcttccttcctgatgttccaggtctccttttaccatttcctttctgataagagaacttcctttggccattcttttagagcagttctattatgacaaattctcttagttttccttcatctgtgaatgtcttatagaattatgagtcgacagttgtttcaacacttggaaaatgtaccacctccttctggccttcatggtttctcctgagaaatctgctgtcactcatattgtttttaccctataggtaaggtgctgctttcctttcactgctttcaagactttaattttcataagtttgactatggtatgtcttggcatgaatttgagtttatcctcttggggttcactgaaaatgtaggtttatgtcttttgccaaatatgacaaaaatgcagccattacttcttcaaacactttttcaaccccacactcatctcctgttactacaatgatgtgaatgtcacatcttttgttatagtcccacaggtcccagaaactctgttcattttgttcattactttttcttttaagtctgctctttgtcaggtaatttctattgttctaccttcaagttcactgattctttctcctgtcatctctattctgctgatgagcccattcagtgacttttttattggctattgtatagttctaaaattttcatttgattcttctatcttctaggtttttgctgaaactttccagttcttgctgagactatttttcatttgtttcatgtgtatctgtaattttatgaagcatttttatgatagctgttttcaaatccttgccctataattccactatctgagtcaccttgctgttgagatctgctgatggcctttcctcactcaggtttaggtattcctgattcttggcatgacaaatgattttcagttgtgtctgttgtgttgttccttaggtccttaggttcctagccagtctgtctttttctcttcacttttcaggtcttcttatgcttgtattataaataacatccttagcaggaaaaataaacacaagtgtgtctactctatcttgtctaaaactggaagagttctcgggtgtttttggaaagtactctgttcacccaacgttatgaagaataagtcaagataatattactaatttgtgtggtatatttcccccatatcatgagctcagtctcatcttcacactatgcatattcattggaaagtactctgttcacccaacattgtgaagaataagtctagataatattactaattcgtgtggtacatttcccccatatcacgggctcagtctcatcttcacactacgcatgttcagctggtagcaaggggacgctgactctgaccccttttcatagctcattttcttacctggaatgttctcccttctttttcccatttcctccttcaagagccaactcaagaaccccttcctttggacacctctccactaccactgctcacatagatctctcccttccctgcccctagattttgattgccccatggtctgtttttcttgagggcagagatcatgcctcacaggtgcctaaacgatggactaagtactgaatgtgaagggcactctcaaaaatggattcggatactttattgcatgtgagcaatggaaagaacccaaaaatatatctaatccaacacctaagtttgcagataaagaaaatgaggttcttggccaggcacagtggctcatgcctataattccaacactttgagaggctgaggcaggcagattgtttcagctcttcaattcgagatcaaccccgggcaacatggtgaaaccccatctctacaaaaaatgcacaaatgagtcaggtgtggtggcacatgcctgtagtcccagctttttgggaggctgaggtggaggatggcttcagcctaggaggcagaggatgcagtgagccaagagcatgccactgcactccagcatgggccacagagactaaccttgtctcagaaaaaaagaaaatgaggttcttgatttataaaactggaaaaggccaggcacagtggctcacacctgtaatcccagcacagattactctgggcaacagagcaagactctgtccctccccctcaaaaaaataagttaaataaaaaataaaataaaactgaaacagaaggaccacacaaaccccaaagcaacaacaacaaaaaaaaacagggtatgtcagcccctatctcttacttaattaactcaaagctaattgttttatttacagatcattagaagcaatgattatcttgcctggagaataattttgagtctcagagagcggaagaaatgtggtatgatcctaagacacaaagtctgtttctgggcatcacagtcagctcctttcaatccttccttaggactgttagattagattagtttgtggaactagccaatccctggagtctaacactagcaatttcccggtcttccagcctagaagctatctgacctcaaaactaattttctttcatgatctttcactattcattgccttgatttccatggaaactctataatcacaaccaaaaatgtaaaataagagaagacgacatgaaactctgaagaaccccacagacttttcagggctctcaaatgtcacctccttgaagagaccttccctgatcgcccttgctactcctgcccccaactaccacattgcctggtttctttatttttgcctttatcagtatctgaaattgcttaacttatctgttcacatttttggtattcagctcctccattagaatgtaagctccatgaaagcagcgccttggtcagtctcgttcaccacagtatcccaagacttagaatgacacctagcatacagtaggtgctcaatcactattgaccaaatgaaggaataaataaatcaataaagaagcgcatacatttttccaagtctggctggtctaaccctaatggctgtttaccaccacactccaggattcttggtggcaacatgtggatactccaggattctttggtggcaacatgtggatactgccagtgggccaaggtgacatttcactcagtgattaaaatgatcatgaggaaggtgctcacgggtactcactctccactccccctgataggagtggccctgcctgcctgacttgttcacttggcacttgcagggccagggagcttttaaactgggggtggggagtgaggtgtgtgagcagagctcagccaagagcacagctaccactgactcaaagaaactaagggtaggggttggggagaagcaatatctgactgagaggaaaacagagggacaacagggaaagaaaggcaagaatttagacaaagtgccagcaatgccatgagtcccttccgactggctcagacgctgccactggtcaacaagccctagcccctcatctctcacatgtggtctacagcagtgcttctcaaagtgcgggggacctaaaaaccacatgagaacttgccagaacagatcatggggccatcccccagagtttgactccttggaccagggcaaggcccactcccaggtgatgcccatgctgccattctgcaagcctcacactgagtggcacatcctacagatgcactagtgaatgtagcagccacacgagaccacagagcacctcagatgtggccagtgtgactgagaatccaaatgtttaattcaatttaaatttgattatttatgtgattaaataaataattcaatttaaatatgattaaatttattaaacataaatagcgagatgtggctagtcgctactgttctgagcaatgcagagagcacatttccctcactactgggaagttcaactggacggtgctgctcttcagcacctggaagctgtgtctcccaacacatccacagcctcttctccccacaagcacaagtgggtcagctttaaaagggaaatctttaaaacaaaacaaaaaatatttgcctctgtatcccaacctggcgcctttcaatctgagaagagataagcttagaacaagcaccttagctcaggcaattctgatgccagagaggtcctagtgtctggtgaggagatggaagaaaaaagcagccagaacaactgggaccgtcaggaggcccccccataagcgagtttgttttttcatcaagtagaggtataatttaagttctatacatttctagaaaattagactcacctacatttcagcatggaagggaaaaaatgttaactcaaaaccaaagagatattttagagccatctgctattttagatcatctgctccatttccactgattatggaggactggctgtactcacattaaacaccttcacatcctttctgtttctgatttcttctacaagagccagtggctttcctttaggaactgggattgtgccaaggattatagtccctggggtagacagcgtctgacgaacagcttgaatgaaaagctgactgaagagctccatcttcccaatctcatcgatgacgcacactctttgccctgggccactgctgcagtcggcctgagaatgacaaagactttcactgggacatcagagtcacattaatcaaagggcccatgggtcccactccccaatcactcaccaatgaggtaaaaaagacagaaacctttttactggatttcaaaaagtgacagcatcccacagaccaccgctggtactgtgtgggaggggactgcacaagggtgagtcccaggagctgggaatcattaggactcttggaagctggcagctatgcctgtcaccagtgggatgttcaaggaagtaacggacataaattggaataaagtcatgagaaagagaatctgagatctaaaggatgcaattgtacttacttttttttcccctttagccaagacttgtttccttttaattttcacttttttccaacaacgcttatggaccagatcatgaaatacacaaacatctacctagagcagttatctcccccccagcacgtagggaatctcatatggctcaaaatggaaaaaagaggccattattatcaacaaaggctcccatgcttgctgtctcactttttttaagcctgaggtatttgggtgccacttattttctggttgtatataaatataaagcttgatctctgtcttggatcccctctctcgaatcactcactctgggggaagagaagtgctatgctgtgaggatactcaggcagctgacggtgaggtccacgtggtgaggcactgaggcctcatgccaacagccaagaggaaatgaacctgccagcaaccacatgagcaagcttagaggcagggccctcccaggcaagcctcagatgaccacagccccagccaacagcttgactgcaacctcagaaccccagctaagctgtacctggattcctgatcctcagatactgtgtacaataatgtgtttgttgttttaagctgctaaattttgagataacttgttccatagcaacatataactaacacacatgtcctctatagaaagccttcctggggaaggctgacaggactttggttgattcttccctgggagggacaaaacagaacatgtaataaacacttcaatgaatggtgaatgacaaatacaccttatatatgtttgtatacatgattattttgaaaactgtatgtaaagctgatttacaaagtattcttcactacagttctgattccttaaatgatgacagcaatatagtcctagagggcatgtctgagttaagctagattttgttcaaattccaaaagccaaagcagcatatggtacagtgtggctggtggtagggatcagtggcaaccaggggcagccagtgacagacggggctgcgggcccagatcctaaaggccttcgaaggcacacacagaggtgggaatcttctcccacagccgaaagagtctaatccagggaggatcacaagttgtgctagaaagactgctggctgtggagtcagaaacaaatgttagactccttttggaatagacaagataagatagtgggtgtctaaaccccagttgtgattgcacggaagcagtacagcagtgtttttcagacttttaagtaaacagtactctattttcctactgcatattgtacacttatgaaatatttttccattcattttattagctaaaagatcaataaggagtccactgtaatcacccaagagaggtctgaacaatctccgcacttctgtgtttctgacatgcttcatttttgcctctctattaagtttatctgtacacacgcctggtctccccacttagggcaggtacatggttgtcctcgtccgcatccttcctggggaactcaccgatgtcccagagctgagaagtggggagctgaaggagcaatgtcaccctccactggtggggtcggggagaagggcagagcatctatgaagtaagtcactacttattccaagtttttcctccaaaacgaaagccatatttgggagaaataaaacagctatcaaccacctgtctatgataataaaaacagacaactgtacaagaaggtttctgtcttcctgggggcatgccactccaactgacccgactgttcccaagtgctgtggacattttgctgcccccagagacgaagagtaattgtggatgccattcctctggaggctgtcatctaaaagccaaaataaaacttattctggcacctcaaaatgagttttggaaggtgccaaatcagacaagaagtgatatgaaagaatgtgtgtacacatgcacatgtatttatttgactatatacatgagggtagtaaaatgcacgtggccatgtgtaaatacacacgtacaggtagaaagtgtgtggctcttcaacaaccagccttcctgcaatcctctagaacattcaccagtgaaagctcatcaacatttatttaagtttcagcacaaaagaatttggacacacatgtatacattactttctaccaattggaaatcctcattttaaaaccttagcttacataaaatcctcaatctgtccagaattggggaattttataatccaagaacttcaggaatctcaaaaataaatctgtgatttttaattaaaaatgcaagttattcatattcagttgagagaaagatgtcagctgctgagccactctgaagcatgtagacactcagcctgcttttctaaatagtacaagatcatacactcaaggtcttaaaaaaagaaccactataacgtgtaacatggttttatttctatataaattcaagcaactttagagggaaacaaagaaataagtaagtaaacaaacattcaccccctttacattgttctaaattgatagagacacagacttagaacaataggggcccaggtttgaagatggtcaggaacccctccccaacccccagtgtgaggagagtcctaatgagctcccagagaaactccacctacagctgctggagtaaggagtgtgtaaaaactgtaggtggctctcagccacgtggtcagaatcacgatgtacacaccatctggggtgtacacaccaactggggagcaccctttcctcccctcacagcctctcctcagagaacaacccaggcagcattgcttcctagtgccacacctcagtcctatgtaacacactagccttcctggccacacccctcacaggcttccacttcagctgattataaatgttcagccatgaagcgcacttttagtttccctgttccgggagagaagatatttccttagatagagtcctaaaattgaccagccagggataagagaagctacgaataattttataactttggttacactcacctagtttgctttccagaaagattagaacaacaaatatcttcgtaccagttatatcagagacctgaaaatagtgtgatttttttgggtcctttatttttatatgtacttttaaaaatacaaagaacatataaatataaaataatttcatttaaccaaaatatcaaactgagagcaagctaatccaagtggtctttgccttattctgaattatttgcataataaatgtttccagtggtattaatgttaattttaggaggactgtttggattgttttattttaatatcagacacacagactagctcctgagcttacccacctgggacagcaagtatggaaagtcatgaaagtgaataaggagtgtctctcagaagttaggcagcaaaactgcagcccttcgccaaacagcagcaagttctagggaagcagaaaggcaaatggtgctaacagcagccatctctgagccagcccacaattcctcacccactgaagttattagctaaaaatgcagggctccggtcatattttatgtgtgtttattccaagccttcaagtctcataatccctttgctgtctggtggcatatggactgtgagtctccagggcatagccaggacaaggtgtctagactgcccgatggcgcctggtaacccggcccttccccagtcaagaatactccgggcagaagctgctcccccggacatgccagagatcctcaccccggcacacagacagactagctctgaggctcttcctggatgtcctaaatggcctctcgggactcacaggggctcacccacatggtcacccgactgaagagcgcttgaatggtagccatggggttttccaagctatcttgggactgaaacaacacctcctggctgacagtcagtccagtgagacggagagcccagtactcctcgtcctcctcatgctctgagcacttgggactggcctgcacatttgggctcctgggactccatgacagattactatcccactccggaccccagctccctggcaaacacaaaccaaattgtgaagggaggctcctctcaaggtactgccatccaccacctcaattaacttctcaagaaaataatcactgctattgctctgctgagcacctcctaggagccaggggccaaggcactttacaagcattacattcagtcctcccagcaacttcacatagcaggtaacagcatctgtttcacagatgaggaaaggaaattaggcattaagggatttactcaaaactcactgagagcacagtgacagagctggagtcaaaccagagatcacctgacttcaaagctctcttccacaccctgtgtgcaatacgcctccacactttgattctgaaataaagaatagcatctaggaaactgacctaaccacgaagaaactgctttcctctccaataagaacgaatagcactctggtgtttagggatctatggaggcataggcacaaaacctcaatttatttggagtaatcatattgctctaaattactcgaaaataactcatattttgggtctgagaataatatcaccaaaattatttcatcaagtatggatagcgaatggcccactgcagtaggcagatatgataaagtaaaaggacttctctcctctaccaggagcacaccccgagaagacggtggaagagttatgaccaggtatcctgatatgtccaccttcctgccagtgtttacaaaaaccaaattaaaaaaaatttcacttgcttagtaaaaattttcatcaatatttaagcttttggtaaatgtttagtatctctgatacctgataccgttttcattagaaactgcctgaggagaaagaactgattgtttttcctataataaaatggtgatggcttttctaatggggaggtaaccggatacaaatagagagaagcacagcttagagtggaaaaaagcttaaccattatggcattttttttagtgcagcttcaatgtatagtaattttatgtttgttaattactgctcaccttgctagagaaacaatttcaaaagagagtagttaaatctgcttgccaattaaggcctcaagagaaaattatttttatcttaagatgatctaataaagtttagataaaattagaattggctaggggaaatctgatgaggaggatgtgcatggtctcacactatctccccactcactgctcattagtgtcaaagaaaaaaatagtaactatacagtggagaaataggacaagtccttgatcaggtaatcaaaattaatatcactaaacatcacacacctccagatgagatactcgagaaggatgcatcatcacttatgacttatggagtattccagctttatttggtcatgaggaaacatcagaaaaactccaaaagatgaacgttcttttaaattggaactatattctttacaaatgtcaatgtcctggaagacaaagaatgactgtggaaatgttccaaattaacggaggctatggagatgtgacaactaagtgtaacatctggaggaaaagaaatgttacaaagaatattgtcaactgatgaaactagaacactaacgatagattaaagtattttttcaatgtaagatttacagaggttgataactgtattgattatgtaaaagcatatccttatttttaggaaaaatatactgaacatttaggagtaaagtaccttgatgattgcaacgtattctcaaatagtcacccccttccagcttatatatttatacacacacacaaacacacacacacacacacacacacacacacacagagagagagaataagcaaacaaggcaaatgataaacataggtgactctggataatgagagtatacaggtgttcttgcactattcttacacttataactttctctaagagtaaaattttatccaaatgaagttaaaaaaattgtcaaaaaaagaaaacacacacgtatgtactttctcagtaccagactcaagaaaacaaccaactcaccccgtatgaacttcctcctaatggagtgtggttttagactgatacgcacgggaggcgagacagaaggaaatgctggaaatgggacaaagtgagagggaaaaagaaaaacggcaacagtttatacaaactcaaccccagtccagcttaagggacgtgtgacttaaggagcatgcaacttttctgtgtttcttgagagtggactgcaagaagaaagacatgaaggtgtcataacccagggcaaaagcctgcttagcatctaaatccacagaatctcgccaacaatcagaaataataaagtctcagtctctgctcaatagaaattatgaagatttgccatgacaaatcttgcaaaatgaactgcagagtcaacctcatgctgaattttcacctcattttcttatgctgattcactgcaggaatgtccttactgacagtttaaaaactgattttctgtttgcgccagatagcttttaatttccctggctgatcctgcattacatacttgtaatacatgaggtagagaaacagaagctgagagagaacaaagaatcaaatgccacatttgctaacagcaatgacagaaattctagcaatgctgaggagcttgtcaatctttcaagaatggatcctgactagaacttggtttttctacattctttctaaagccaagtggcctgagagtgacctaaggaacacttccaggtcgagtctaaaaaaacaaaaacaaaatacttttccctagacaggagtcctctcaccttcaaaggaagtttctaagattttccaaagcagagcctatttcagaaccaaaagtagatcctgctctcaaaaacaaatatactttaaagacttattttaatcaaaacaggaaaatacaaggttcaaactatgttggttttccctgggtgttctgattttagcttactcttcctttcacagatctttgtaaaaaatgacactgttcacctggaaaacagggctttgagtagatgtcctttgttctttaaaacattataatctattgtctccattttgtgtgagtaggagatatgttgaaaatcaataaaatgttacatcttacattgcatcaaattttaataaagcattgagggtagctatcaaaaaggccattatgaaaaaggccagcattatcttatcagccttgatcattagaaaacagaaaaaacaatcctaattccagtagcaccagaaaataggagagccctatgaataacctcaccaataaaaattttaaagaaacagatggagaaagagaaacatgttttgggctgtggagaattaagattatctgaaaaattaagacaccctttatgtcaaaataactatagtcccaatcactccatataagacattttttttaatggatagtaaagtcttgattctatagttcactccagctctaccacttacacaattagtgtgtccctgggcaagtaactttccattctatgcctcagtttcctcatctgtaaaataggaatagagtgatagtgttctgaggattaagtgagttcatgcctggcacgtagttcgcactcaataatagtttactattacaagtgccaccattactacagtttctgaacaaggccattttttgaagaagaaaaataaaaacgattaccatggtaattaaaatactatggtactgatgcaaggatcaaacagatcaatggaagagaacagataactctgaaacactatacatacaagcacacatagttttaatataattaattaagcataaaaaactaattagaaatgggttatttaacaaacagttttagtaaactggctaaatatctggaagaaaatcagctgagaatctcatagcatattacactcaacataatccaaatgaattgaaaacataaatgtttaaaaaaagcatgcagaagaagaaatatataggtaaaattttatataaatttggaatagggacagacttttctctaccttgaagggaaaataatcaccaaagtgaagtgctaaactgagaaaaacagaatcaataatataaaaaggctatctgctttataaaacatctatttaagcccaaagaaaataaatgggaagagcaatggatgaacaactaaaattaaggaaaacttaatgaacaactgaaaaacatttaaccccattagtaactgaaaaatgcaaatcaaaacaaagcagtgtgttgaaaataagtagagtgctcagggctggcacagcgcagcaagacaagcacactcacaccctggcagtgggacacaaagtcaacgcagcaccatcaagaccttgaaggttcacaccccaccatctcagacttcaccttttagaccctccccagggaaacaatcatggctagagaaaaagattcatgtataaagggtgctttgttgcaaggttacttacaatggtgatacggaacctgaatgctcaacactgagggagtaatagttaaatcaaagatgaaaactcataccatgaaataggatgaaaccactaaaatctcccagctttgaagattagcatgttgtgagaccattcccatgtccctcaatcatattaagggaaacacaccaagcctatgaaactatacataacattttccctgatcctgaatgactgaataaataaaccaggtatacaaaaggggcagaaacaaaataagctaacattggctaacttagtgataagattatgagttattcacattgtgttttttatttttattttacattttttataatttttttaaccatgaatatctagaacttgaatactcaggaaaataacaaatgttgacaaataaggaaagagttaactcatggaatgaaaaaaattaacagtcaaccctactagaggctttccaaaaaccttcctgagtctagaacacttaccacacacactctatttttctttatttctcacgagcgaccacgatgctcaggctccattcctgcctaaagaaacgtaaccaggctaggcacagtggttcacgcctgtaatcccagcactttgggaggccaaggtgggtggatcacgaggtcaggagttcgagaccagcctgaccatgatggtgaaaccccgtctctactaaaaatacaaaaattagccaggtgcggtggcaggcacctgtaatcccagctactcgggaggctgaggcacaagaatcgcttgaaccctggaggtggaagttgcagtgagctgagatggcgccactgcactctagcctggctgacagagcaagactctgtctcaaaaaaaaaaaaggaaaagaaaaagaaacaagaaacataaccagagcagttttgcaaggtgaacctgggttgtgcctggccctcctgagcctctcctggagctgctcttcagctcccggccactttttttttttttttttttttttttgagatggagtcttgctctgtcacccaggctggaatgcaatggtgccatcttagctcactgccacctctgcttcctgggttcaagcgattctcctgcttcagcctcctgagtacctgggacacgggcatgtgccaccatacccagctgatttttgtttttgtttttagtagatactgggtttcaccatattggccagcctggtctcaaactcctggcctgaagttatccactcacctcagactcccaaagagctggggttacagacatgagccgctgcaaccagtcccagccacatccttacttccccacctgcaaataggcatagccctgcttggcctaattagagaagtacttttttcttatttttttgtagtattaaaacacacacacacacatacatacaaccctcaaactatctttcactcatacatattgaaatttcttacacacaatggatatttcttattatcggaatttgtgttttcatagatcccagcactatgaactaatactgtgtccctttataaagggtttctaacacttccagtttacttggttgttttcattgccagtatcaaaaatggtgtgtttatactccccagttttgttgcctaattattttaattaatattcttttcatttttttctttagtataaagacaaaacactagttccttctcctttcttcattcccataaaatatgtatgatgggagaaaaatttctgctccagaaaagaaatccatgaccctgactgggtgagaatcctatattagtccattttcacactgctataactacctgagactggataatttataaacaaaagaggtgtaattgactcacagttccgcattgttggggaggcctcaggaaacttacaatcatggtggaaggcagaagggaagcaaggatattcttcacgtggcggcgggagagagagagtgcaggggaaactgccacttttgaaaccactggatctcatgagaactccctcactatcgggagaacagcatgggggaaaccacccccatgatccaatcacctcccttcaggtctctccctccacacatggggattacaattcaagatgagatttgggtggggacacagagccaaatcatatcaaatcccctgccaggaactttttctacatggaatgtacatgtctgcatttggcaatcagaatacaaaatgttgggagaagtctgtatttctttattttttaattaaaaaacagatttatgctctgatctggtcagcatatgatctcttatataatcttgcatctagacactaaacacctgtgcaaactctcctcccaggatttggtctactctgtctgagcagggtaagtaaaaaattctttgtattgacccagtcagttcctaaaaccagaatcttcacttggaatttcatttgaagtatttcacttgacttttgaacatttaagtagagaggaatgtatgtgacgggaaaacagctaaaaagaaaagtaccatgttctctgctcccgcaaaacacagtggccacgagagtccccagcacaggaactgagggtaagttccaagaggaaggaattggggaagaaggaggtgggaggaggaaacacagcgtaggaagaaaaggagaacttggtgggttccaagaagcacaaccccctgctgaaacagaccataagataccaccagccctctgagattagaggatatcctcagaggctatagctaaaatcttcagcagcctttgggcaaccaccactacatacttcagctgagctctgaatgtcaaggagcagagaggcaaagatctatgaagacagcgtgctcaccaaaaaaaatggcaagtgccaagggcctcagcctggcatatgtgggaagtctgattgaaccagtgtggctgaagaatggcaagatgaggtcagaggttagtaaggccagatatcacagggctacagggccttctaggccactggaaggactttggactttattcttggtgccatagaaaactctggatagtttatagttggtttttgagacaggtctgtatcatttaattttcacaaatcaaagtagtaagtctgtaatagattaaatgacactcacattccttaacatggtccacagagccctgcatctcatggccccccacctcaccaaacttaccttcttcacctgctcctgctccagggctctgaggtctgaatgtatctgttcctgccatttagaatattctccccagacctccccaccctgacacatacaaataccccaatactaactctctctccccaatgccctctcacctgttcctttctgtttaaatgtcatcttcccagaactctttcctggtcccttggtctaaagtcagttcttcctgtccctccctttcatagcaccctgttcttttctttcacagcattaatgaccatgacaagtataaatttacttagtgtctacctttcccactagactaacagttttgaaagagtagaaacatgtctgttttgttcatgactgtatatgcagtacttgataaatatctgataaatagatacataaaactacataatcaataaaacaaaagctggttctttgaaaagatcatctaaattgacaaacttttagactgaccaaggaaaaaagagaagatttaaataactaaaataaagaaagaagtgacaatatcaccaatcttacaaaataaaaagcattatgggtgaatctatgaacaactatatgccaataacttagatacttcagatgaaatggacaaattactaaaaggtacaaattaccacaactgattcaacaaaaaaatacaaaatcaacagacctataaggagagatttaattggtaatttaaaagcttctcaccaagaaaaacctagcccacatggcttctctagtgaattctatcaattattcaaagaaaaattaatacgaatcattcacaaactcttccaaaaattagaaaagaaggaaacacttcctaactctattagaccagtattaacctgataccaaaactaaacaacaatatcccaagaaaagaaagctacagaccatatcttttgtgaataaagatgcagaaatcctcaacaaaatacgcctgagtaaactctatacaaataagacacagttaacatcatacataatggtgaaagactaaatactttctttctaagattaggaataagataaggatgtctactctcaccacttttattcaatgttggactggaggttctagccagggtaattaggcaagcaaatgaaataaaaggcattcaaagtagaaagaaagaagccgtaagatgtcaataaagtttttttcttttttaaaaaaggtaatataataatataatacgttaactgcttacagtacttggtaggcattcaataacaactggctattatgttcatataatgacattttctcttcctaaatgtttgttgtgctgtgaaaccaggttaagacatgactgtgagaagacagaggaaagacttatctttgggaatgttggtacctgggcatcaagagcctttccaaaataaaatatttatatgtactgaatttataggaatttatctgtagctcagagtgatagcaaattatgttgtttatccttattaagactcaatcttttcaattgtaaaatgcaaaactggggcctttaagagcaaaaggcattctgtttccatggctagcaattcccacaatacactaagagcagatgggttcaaaaagcagaaatcacgtactcacattcctcaagacgggtagtgccaactgctcaaaagaagtcaggtcgaccacatactgcccaactcggcattcacgttttccaggtggaggctctaacctgaaggaaaagacattatgttctttgttgaaaaactcctgtattgatttctggtttttagctgctccactgagcctctggcattccacatatgctaaatcatccttaaaaatgaccaacacaaaatgcggtggtctgtaaagctgatcaggttttctctgctttgaacagagctaccctgttcaaagtgtccacacctccaacaatgggccttgcagttatggcagggctatctcttaaggtccaagcagctactgcatcaacagtctttgaaaagtggcaccagaaacaggactaagaattataaagtgagaggagtttatgacttggtgaacaagttttaagtaaaatatcactttcttatacttttttcatgtgatggtttcattctgttttctttctctgagaaatccctaaaggcctaagattcttgaggatagatgacaacatttggctcaaccctgtgcccagggagacactctcaacctaaagggaaagcagatgggcatccaaggacccaacagagtatctgcttttggtgaatttagctcttgttgaaaagctcccaaagcacagatggaaggggagcttagataatagaacaccacagaaatgaaatatcagtacccaactctcgataaaggcccccgggtgccggacaacgtgacgacatcgaatcctattcttctccctccctgtctgacttcttcggtataaaatccatcaacaggcacaccagaggattttaaaacctcactggctttatggatcaatgttgtttttccaactcctaaaataaaaaaaaaaaaaaaaaaagaagaaaagcccattaggaaacattcccttactagagcacacacagcacttgtggactctgaggcagcaattatggtgggtagagaaatgggctgtaaatggatttatgaatatgaacttcaatttaattttgattgctccaggtgctaaaaatgcttaatttcaagtagaaacaagcataataaaaacacgaatgatatcttgaggtttatttttaaattgtgaaacattgttaattttgtcacgtacacaatcccagaatcaactgagaggttcctgatgatattctcccatgccatttgcatcctgtgaaatggtttacagttcccatttttctgcccaggaagtaacactggtcacacttgagtcaggggctgggaatttaagatttcagctttcaagagattacaaacggacctacacttaacagtgggaaaatcactttgttcctcctttgacttacattgttgtaactcctgaaaatgtgtctcttaaatatcattagcatccctgttaatggtcactttcaaactttttcataacagcaagcctatcaggttagcaactccttccaacatcatcttctccagggtctctaagcatttcttcacctttatcccccacaccttccccagtttgaacctatgtacctctgccccctcagcctccccaccttgatccttcctgtccatccagcctggtcagctgactactctgatgaactcactggtttgtaagcaccaacaggtgctacctaatatagtaatactcatcactgacgtcatggagccagacactgttctagcacactttggaagcattttcttggttaagtcctcacaaccatcctctgaggcaattaccatccttatgcatattttacagatggagaaactgaggtacatggtggttaggtattttacccaaggctatacccctcataaggtccatacctttcaacaggggactttacctgtcaccatgactttttaaaatatgagccttgttcccaatatggatttaagtaagtggcatcatgactacccaacaatggaaagagagagaaaactcctagcatgtctgcaagtgagctattttgagatactacagagttgcaaatcatgctatttctaagactacccactcttttaagcctccttgacataaaatatgatccattattcttatttaatgtatctatcttcacacttcacattaaaataatggcacctggctttctggaacatgaacagcaacacaacaggattctggctacagtaagccacagtgagcatgcagctggtagaactgtgtagaacataaaatgatgacattctaatccagccctggccatcagtaacaactgctttaggaaagtcactaaagaatctgtttcatgcaagtaatggcattgccgaatgtgtaagctgctacttcttttctgaagggcaatttcaatgcgcctgccacagcaccctgtagttcatgactaggaattcatcctcaggaaacatcaacaatacaaatgtgtgaaagaggacattcactgcaacattctttataatagcaaaacactgaaaacaacctaaatgttgattgtaagggaatgttaactcatggcaccatgtatataatagcacataaatacacagaaataccatgcaaccattaaaaaatatactgcttatatgtatttattagcatggaaaatagaccacaatgtatgaaaataatatatggaaaaagcaggttaatagcagaaaccattccattatgttttttttaaagaatggtcaagtacgtgtctacagaaaaaaaaaatgtcaagaagaatacagaacaaagatttacaatgttgatttctgatgttcaaattccctgtgattgtcactttcttccttaaacttttcttgttttttttaattcttatactgaatgggtcttactcttatcctaacaaaaattgccgtttatattttgaaaaagataaaatggagcaacggtaactattcctgttcacaaagggtatactgtggggactgtatgttgtgtagaacatagtagagcaataaataggaagcatttgggcaaagtcccttttggcttcttcagctctaggaatcttctttcagttaattttttcttcattagttaagctgctaccccaatgctgtctggataagaaatgacctctgcttcaggagacctcgagatgatagctgtataccaggcacaaacagatcagaaagctctggaattattttggttctggttctcccctaagcagatcctcagataaagattcaagtgcaggtagtttaacctgggcagtgacaacatgatggactggcagggaagaaattcagaaagggaagggaaggacaccagcatgaggtgcactgtcaagcaagttccactgggggcagctggagcttcaaccccctggggaatcctaagggacaagtcagggcaagtggctcagttatcctgtctgaggagtgagaaagtagggaatttatcaactaactttcaccaatcacaggttgaaggctaatcccagggcacaggaattccctggctcttctggcctgctctgtttgcaggccaagtgggctccagggaccagagaaagccctccaagatgagtcatgggtacagacagttggaaatcggaaaaaatgctaagtgccaggggcactaagaggatatgcaacaaaaagtgacctctttgagaggagactttacctgatggtctgaacatattgagaaaacagaaagaaactaggcaaataaaaacacctgacaataactcctaatggggaaaaaagttatgtgtaaaaggaaaaaaaaaaaattagagggcatggtggtgcatgcctgtagtactagctactagggaggctgaggtgggaagatggtttgagcctggaaggtggaggttgcagtgagccaagattgtgccactgcactccaacctgggcaacagagagaggccctgtctcaataagaagagggaaaaaaaagatgggtaaggtggctcacacttataatcccagtattttgggaggcccagatgggaggatcacttgaggctaggagttggagatcagcctgggcaacataacaagagacaggtctctacaaaaaaaaaaaaatacccgggtgtggtggcatgcgcttgtagatccagctattcaggaggttgaagtgggaggatcacttaagcccaggagtttgagaatgcagtgagctataactgtttcactgcactccagcctgggtgacaaagcaagatcctgtctctaaaataaataaataaatggaaaagaaatcatagattactatgtggctctgttgtgattgtctttacatggccataatactgtaaacattgactaatgaaaattacgctgtaactacattaagaagagaaggagaaaagacaaaggtgcgtgggtttgaggacaggtttaagagagctacactgtagaattatttgagtctttcaactacgtgtaggtaagactttgataaagcagaaacaagaaccaccatcaatacaatcacggtaacaggacacctccattaataaaacacacagttgtcttggggtcagcctgctgagtatcaaactgcattccaagtttcaaataaaggattgacaaaccaactttcagaaaacagttctttgcaatacttaggagtgactttagatagcaggcatttctcaaaccaccctcctcctcctcaccccctgctccccaactcccccatccaatgcctgacaaaatcccaaagtctgcaatattagctgtagcctttgctacttacaactaaacataatcattaaaataaagtgaaagagaattctagatccagggttacagcctttgatatctgaacccacactaaacttcaaaattagatttgccttgcaaaggagctgaagaaatcactttctccactcttagcccatctatctttttttagcctatctgatgcagcctacctgtcctttttagtaatgcttgatacatgggtagcgccttggtttaaaagcacctcctcctacacctctcatctgacctcaacgctatcctgcttctcagatgagaactccacaggccacagggttgagggatctgacagacatcaggaggggacagcgacaggaacaagcaagagtgtctgagaagggctcctgtaggtaccaaagcttctccacctctggcctcagctgtggagggaattcgtggggatggagatggggatgggggtggggggatgaacttagatgggaaagaaaggttacaacttcagtttcgctgtcctccaactaaaatttaccattttttttttgcacgatcaatgtagcaaagacccacagtaaggaaatacctgtgactatcaacagaaattagacatctccacttcacatcgcggttgccgcagatctcttgaaataccatttgtgcagaccacaacgtcaacactacagtaggagttaccgctgccgctggcccctgcggtttctgcccttcatcaagaagccagtctaggaccccctcacaagtgtgttctaatcctttaggccctgtgtcttttaaatcacgttttccgggaaggagtacaaactcttcagactaccaagcccgccatttaaattgggaacttcagaggccggagccctggagccggagaccctccccgacagcacaaggtcgcccgcagcccgcgcgcccccaccccctcgacctcttggaggtggggatcccctcagggttacctgggggccccgttaggaacacgtgccgggccatactggtgggcgggggtaggggttgcggtcaggggagcagtccaggttggggtcgcaattcaggtcaggtccggaccagggtcgcgactcaggacccgcccaccgcgtgtcgcaggccccgccc

SEQ ID NO: 816 - DNA, 15689 bp, Homo sapiens
agagcccagagagctgaacctgcatcccggacctgcggcgaccgtcgtacaccatgggcctccacctccgcccctaccgtgtggggctgctcccggatggcctcctgttcctcttgctgctgctaatgctgctcgcggacccagcgctcccggccggacgtcaccccccagtggtgctgggtgaggcacgggtctcgtggtggatctgtcggtcgggcgggacgggccgcgggcggggctgccttcccggtctgcttctgttccagtcacgaaatgggggagcgtattggtatctgtcttgtcacttaggtgatctagatctgccggctcacctcccgccatgctgggcgcgggtgtggtcagctccccacctcctgtcctggtagaaaatgggggtgagtgggagagttaccatctggttattcatagttccacctgtccgcatcattcccaagccttgcctccccttatcccatttttaagctggaaagacaggtgcttcagccccactcctgagggatggtgggggtgtgtagagtggctcctgagttgacttctgcatcgacctgggcctggttaggaggctgtcaccctcgacccctccaatgccacatatgccagaaggcattgctgaaaggaacctccttagggaaaggattgctgtcctagctggccaccaactcccacaacttatcagatgtgtggcattgcctgagggaaaaggcctaagggaaactgaagacaactgaagtcaggggaaagggttgggacaatggccatgaacctgtgtcaggcaacatgcttgtactcttaccctgccacacatgcttggactagactatgtggaggctcggtgacctcccctgctcaccccgctccttgatcacaaccctggcaactctacaacggccactgtatttccttgcagggatgggcagggatgagacctctgtctggggggccttgggtgcctcattgaggccgtcactcccatccagagctggtgtgtccgtggccagccaggattcctgaaagcagaggcatctgaggcatgaattacacgtggagtctagtgcagcatgatctccatgctctttctgctgagagtactttaaatggggacgatgcaaatcacagaagggtagagttggcaggtagggtggtgccaggcaggccccaccaggagttcccagccaggaaaagctccagggggatactaggcccaggttcaccatgggatttgggcagacttggccctgcctccccaaagcttgcaggataggaataacagtgatccccagagaggaagtctgtgtggggcaagcacagagaatccaccaacccagcctggatgggtgggtgtcaagtaaggcttcctggagtatatagctggagctaaggccaggagagagtaatgggtcggggagagacgtgagcatctcaggctgcctgggatcgagtcacaggaggagtggactgcacaggacttgtgactggttgggtcatctgaactttatcttgagggcctcagggagtcctgggttggcctgcagagttctaagtctgaggggcgtggcattaggaagcatgtggtctgtggcacacaaaatggcacatagccattttgcctggattgatgctaaccgcactcatcaattcagtcagtctgtttatccttggtcacagcagaagagcctcagaccccacccagaatcacagagcagcaggagtcctaacatgcccagcttctcagggagtgaggctgctggccttagccctgggagacctcacggtgggcagttggataagcagctcctgggcacagagcagggatctgaccttgactgtcagaagatcagaatcctctaggggtggatcctgaaatggtggtggaggaaagagagaccagcgatgtgatacagaagaccctgggcaaggggaagggaccataggcaaggccatttccacctcttgcagcctcagtctccccatctgttaagtggaaatagtaaggctgtcccctcccagtgttacttgaggtgaaaggcatgtggatggctcttttcctagttccaggcgcagatgggctcaggaagtggccactgctatttttaggggccacacagcctgaccagggtaaggagcatctgagcaaagcagatctggtgacttcctcttttaccatttcccctttggtagagacagtgaccagggtctctgccctgccctgcccagtccacaggcatgtcatccagaggctgtcatgacagggactccctccctctgcacccataccatgaagggaggtgaaggcatgtgccgcccctgcctctcatggcaccctgaagacactgggatggtgcccagggagggcacgccctgttcagggtggatttacggtcagttcccagtgaatgtccaggagagccaagtgctggtttttcactcaatgatcatggaccctaaacggggatgtgtttgggaagtggcgagagcatggcatgtgggggcaggtgaggcccgaaaggtcaatgggagtaacgagactgtgaagggctttgacgcagtggggagggatttgggtgtcaccagggccccagagttctgagtacactgaataggatggctgggatggagagaagtcaccctagggcctggactgtggtgataatggtgctggttcagggtggctgtttccaatacgggctcccagccatgctagggccctccagatgatctgctctctggcaccttactggactctggcctttagtaaggcctgggcccttggtaggctggcgggtgccaatgtaagcttctctcagctgtgtttctgttcatttccctcccaccagcctgtcctgcatactttgtctggttgaattttagctgagtggcccagggctctgttctgtttccttcttcctctctcagggcgaacaggaccctgtcttctatgtagcctgggatagctatgggtggaagacttttgggttcaagcctccagggtatatatctttttttttttttgagaccgggtcttgctctgtcacccaggctggagggcaatggcacgattttggctcactgcaacctctgcctcccgggttcaagcaattctcctgtcttaggctcctgagtagctgggattacaggtgtgtgccaccacaccaaggtaattttttgtatttttagtagagatgggctttcaccatattggccaagctggtcttgaactcctgaccgcaagtgatccactcacctcggcctcccaaagtgctgggattacaggcatgagcccctgcgccctgcctcgaaggtatatatctaatgacaagggccttggccaaactttggaggttctggaatgcaaaggggtctccaagcccctcctcccaggcagagctcccatcggggtccattaaccatagaaaccatgtgtagaggtgtgtctgtgtttgctgggggtgattcagaccaagatctcatttaacagatacggaaactgaggcctagtgtggggagtgacttcaccctgaacccccttccaataatctgaatggcccaggaggatgttccagtgaaaatccaggagacttactttatctggagttggagacaatgttagggcccttccccaaacatgtcaggcctctcccaagccccccacaggcatctctgcaccacacagcagtagcagcttttctgcacaaagatggttccctggcctttgggtcaaggtccctgctctctgaatttcctgccaccagcactgtgctttaatttgagatgtggaactgcacaggtctgccatattatctgtggctcttcagggggtctgctgcagacatcaaagttcttgggagtcttgaacctgccgggctgagggctcacacatgtcctgtgccccctgcagtccctggtgatttgggtaaccaactggaagccaagctggacaagccgacagtggtgcactacctctgctccaagaagaccgaaagctacttcacaatctggctgaacctggaactgctgctgcctgtcatcattgactgctggattgacaatatcaggtgggggctggggcacacagaggggggtgctgctcaccaacagtgcctgagaggcctccagagtctgttccttctatcctcatctcgaggtcactgacctctctccttccccaggtcctcggtctggtctggtctggtctggttggcaccacctctgcactcccaggcagaactaactttcccttcctgctgcccttgttcctctactctccagtcctggcctctcatgcctacacacaattttttttttcttttattttgggatggagtcttgctgtgtcactcaggctggcgccatctcagctcactgcaacctccgtctcccaggttcaagcgattcttgtgcctcagcctcccaagtagctgggattacaggtgcccgccaccatgcctggctaattttttgtatttttagtggagatggtgtttcaccatgttggccatgctggtcttgaactcctgagctcaagtgttctgcccaccttggactcccaaagtgctgggattacaggcatgagccactacgcctgcctacacaaaatttctgtgtcccagcccctattcagagcctcggcatggcccccacccctttccttgtctgtgcctcggcctcccctacctctccagctgcttattcttcttgggacatgccatgtctttgtacctgctgttcttttggcctggaatctatttctacaccctttgcctgataaatggcttccattcacttttttttttttttttttttttggagacggagttttgctcttattgcccaggctggagtgcaatggcgcgatctcggctcacaactcttttttttttttttaacttttattttttgagacagagtcttgctctgtcgcccaggctgggtgcagtggcgctatctcggctcactgcaagctccgcctcccgggttcacgccattcttctgcctcagcctcccaagtagctgggaccacaggcgcccgccacagtgcccggctaattttttgtattttttagtagagacagggtttcaccgtgttaaccaggatggtctccatctactgaccttgtgatccgcctgcctcagcctcccaaagtgctgggattacaggcgtgagccaccacacccagccccattcactctttaaaacatgaccctaggccaggcatggtggctctgctataatcccatcactttgggaggctgaggcagtcagatcacctgagctcaggagttgaagaccagcctgggcaacttggtgaaaccccatctctaccaaaaatacaaaaaaattagctgggcatggtggcatgcacctgtagtcccagctacttagggggctgaggcaggagaattgcttgagccagggaagcagaggttgcagtgagcagaccactgtacccagcctgggttgcagagcaagaccctgtctcaaaacaacaaaaacctgaccctggtccctttgtgacatgtcccttttgactccccagagcggtttgcctctcctcccaggccccatgcttgcttcctctaaacatcatcatgtgcccgaatttgtctgcaggcatgtttgcccaaattgcacaggcactgtacattttatatactttctttcagttagtcttacagcaaccccgttttgaaataggtgctgttttctttttttttttttcaccagtgttacttgccaacaggtggtttttaaacctgctttacaactgcgaaatctggaggctcaatgaggttacaaaattgactgtgctcactcagctaataagtggtagaatcagaattcaaatccagaatgtgtggcgttgagctgaggttccctcccaggctgagttccgtgaagggagggagtgtgtgtctgttttatccttatagcagtagaaccagaaacacagttggcgcctgataaatgtttgagctgaatggagtctcccaaattaaaagtttttcctggtcgggtgcggtggctcatgcctgtaatcccagcactttgggaggctgaggtggacagatcatgaggtcaggagttcgagactagcccggccaacacagtgaaaccctgtctctactaaaaatgcaaaaattaaggccgggcatggtggctcacgcctgtaatcccagctagtcaggagtctgaggcaggagaaacgcttgaacctgggtggtggaagttgcagtgagctgagatcgtgccattgtactccagcccaggtgacagtacaagactccatctcaaaaaaaagaaaatacaaaaatacaaaaatgagccgggcgtggtggcacacgcccatgatcccagctactcgggaggctgagacaggagaatcacttgaacctgggaggcagaggttgcagtgagcagagatgggggcactgcactctagcctgggtgacagagcgagactgtctcaaaaaaaaaaaaaaaaaaaagtttttcccagagacccgctagctgctcctccaggtgccctggcctgccggctgtttgtgatgcccattttgatgactccttcctcctctgtgtgttgtgtgactggggttatttctgggctgttgatgtgcatttctatttttatactggggacacagcctcaggtgctgccagttggaggtgccagctgataccaagaggggcctgtctgccttcactgcttctctgacccgtttagattttcacccagcgcagaactgctttggctttccagaacagttttctgcattttgctgtttgataatttatttttagtagcaacaagctactttgctatgtggtcattgggataatctacaaattgccctggagagaatgggcctccaggacctgttatctgggtcagttgtggggatcctgtcagcttcagtggctgatatctaagtgggcaagtgggactcaggaccaccagaaactccaggttcctgtgttttgggggcacatttgcttcttcagtgtgtggcgaggccagagcaaggttcccagcctcgcacagaggcacaaggcttttctcctggtataaggtgtctcccctggcccatcaccctgttcccatcatttcttcaggccttgacaaccctcttcccacaggagatggtgcagcagctgtgtactgagccctgaggcggggtctgtcctgtctggttctgtttggcactgcagctacagaaactatgagatcacgtgtgtggtgttagaagctgctgagtctgtggtaatttattacacagttctagaaaactaataggctgggtgcagtggctcacacctataatcccagcactttgggaggctaaggcaggaggatcgcttgagcccaggagtttgagaccagcatgagcacatagtgtggccctgtccctacaaaataaataaacaaataaataaataaattagccagacctggtggtgcctgcctagctgttcaggagggtgaggtaagaggatcacttgagcccaggaggttatggctacagtgagctatgatctcctcactgtgctgcagcctgggcaacagagtgagaccctgtctcaaaaaagaagaagaaagaaaagtaagaaagggctgttagggatcttaagtcagtagctggtggtccatgtcctatgtcatggcgcttaggaatttgctgggcaagccctgagccttgtggctgcagtctgacagttgatacagccctggggtactgggaggtcataggagcatggttcattcccttcctccatggaggatgtgtttggaggttggctggctgctgtgtccaatgcgcagaggaagcgggacccaattatacctacctggggccacacaaggccttcctcctgtctctccccaccagctcccatcatttctctgggccttgctccttctcctacctgcctacccacccatacagcagccctgaggcatggtgcctttctagggtttgtttttgtttgtttgtttgtttttttgagacagagtttcgctcttattgcccaggctggagtgcagtggcgcaatctcggctcactacacctctgcctcccaggctcaagcacttctcctgcctcagactccggataactgggattacaggtacacgtcaccatgcctggttaatttttgtgtttttagtagagatggggtttcaccctgttggccaggctggtctcgaactcctaacctcaagtgatccacgtgcctcagccttccaaagtgctgagattataggcgtgagcccctgtgcctggcctagtgtgttttgttttgttttttttttttttttgagacagggtcttactttgctgcccaggctggtgtgcagtggcatgatcacggctcactgcagcctcaatatcccaggtgcaagtcatcctcctgcctcagccttccaagtagctgggaccacaggcctgcaccaccatgcctggctaattttttatttttagtagcaacaaggcctcactgtattgcccaggctggccttgaactcctggcctcaagcattcctcccaccttggccttgcaaattgttggaactacaggtgtcagccactgcacccggcccctgtctggttctgttgtgtactgcactcaccacctccttcacctgggatacgttgggctggcaggagctggatgcaaggagatggagcgatggaaagctgaaagagggtagactgcctcttggggtccagtgtgaagttcacggcagaatcaggactggtacttccttctcccaaccaggtccaagaccctcattctagagtagggtcacgggggagaggggaatgttgctttgacaggggtcctggggtcagtatttggagtaagtatgccttggtggggtcctcatttggatgtaattactctgatctgtgctttttatttttatttatttatttatttatttatttatttatttatttatttttttgagacagagtcttgctctgtcgcccaggctggagtgcagtggtgtgatctcagctcactacaacctccgtgtcacaggttcaagcgattctcctgcctcagcctcctgagtagctgggattacagtcgcctcccacgacacccggctgattttgtatctttagtagagatggggtttcgccatgtttgtcaggctggtctcaaactcctcactcaggtgacctgccagcctcagcctcccaaagtgctgggattaacaggcgtgagccactgcacctgggcaatttttgtatttttagtagagacagggtttcaccatattggccaggctggtttcaaactcctgacctcaagtgatcctcccacctcagcctccctaagtgctgggattacaggtgatctgtgctttatcaacctgctttgttacttttcggtctctcctatccatctgaccaaacctgggcatgagaagggagtatgactcaggacatgatgcactgttgggacacaccaagctcagtgtcccctccgggtcactggctcaatatcctctcacaacaggctggtttacaacaaaacatccagggccacccagtttcctgatggtgtggatgtacgtgtccctggctttgggaagaccttctcactggagttcctggaccccagcaaaagcagcgtgggtatgtagcccttactcaaggcctccgggagctgggatggggtttctgccggactggagctggagctggaggaactctgctggtttgtagggacagcctgtgagctgtctctgatcagcgtgggcacagagccctgtagcattcttccaaggacctgctagctgtcacagtctccatgctgggcatagtgtaggtggccggcactagctgtatcttttcttatcctctgtatttctgtctacaggttcctatttccacaccatggtggagagccttgtgggctggggctacacacggggtgaggatgtccgaggggctccctatgactggcgccgagccccaagtaagcaggcactctcattccctccctgacgtctcgggaggtaggggtgaggtgatcatgggcaccacagaccttgggctctccccttgtccttggctgtctcctgtccctgggcctctggcatccagtctagtggtcacagccaccacctttggtcagtcttatcctgtcctccatttcccaccctgggacctctgggcctgtgagccctggggagaaatataaggcttcctcccttcatggaaggcggggggacccagaccgctctgtttgaatgtgagcaccctcccctccccctctcgtcttgtgtctggcctgagaaaagctcagtggttccggctccaggacccttcccacctgacccctgcctggctctggcctgcagatgaaaacgggccctacttcctggccctccgcgagatgatcgaggagatgtaccagctgtatgggggccccgtggtgctggttgcccacagtatgggcaacatgtacacgctctactttctgcagcggcagccgcaggcctggaaggacaagtatatccgggccttcgtgtcactgggtgcgccctgggggggcgtggccaagaccctgcgcgtcctggcttcaggtaagaccctacctggcccagcgtggggggctgttgccaggaattctgccctctcttcccttcctaagtgtcctcctgggccagcatgcctcgtgtctgtcccacggtgtgtggggtctatgcaaatctacccctaaaagtccaaagaagaaagaggctgacaaatctagtttctcagagaaaagcatttaatagggacatacgaatagaagccacatctgtgtctcaggtgggggcaagacaagatggtggatccccacactattagcccccagacccagagcttatattctgtagggaaagggcgactccgatgcgatgtgttgaacattgaaggatgataacacagaggctgttttgatttatggttaagtacgtgcacaagaaacagtagataaagtggaaatctcagtggccttcctggatctggggttaatcagaagccaacatggtggattagtatccaaaatggagttgctttggtctccacaatgactattctcttgggtcagccctgttttttttttaatttttattttttgagacagagtctggttctgtcacccagactggaatgcagtggtgcaatcttgtctcactgcaacctctgcctcccgggttcaagcgattctgcctcagcctcctgagtagctgggattacaggtgcccgccaccatgcctggctaagttttgtgttttagtagagatgaggtttcatcatgttggccaggctggtcttgaactcctgacctcagatgttccactcgcttcggcctcccaaagtgctgggattacaagtgtgagccactgtgcctggccatccctccctcttaccccatccttacttcttcatccccaccttcaccgcagaggaggaaggctagagcattttttttttttttttggaggcagggtctttctcactctgccatccaggttggagtgcagtagcgtgattttggttcatgcaacctccaccttccaggttcaagtgattctcctgcctcagcctcccgggtaactgggactacaggcgcgtaccaccacacccggctaatttttgtatttttagtagagactgggtttcactatgttggccgggctagtctctaactcctgacctcaagtcaggaggatctgcctgcctcagcctcccaaagtgctgggattacaagcatgaaccaccgcacccggccagatttttttgtatttttagtagagatggggtttcaccattttggtcaggctggtcttgaactcctgacctcaaatgatctgcccaccttgacctcccaaagttctgggattacaaggatgagccactgcacctggcctctagactacagttttttatttatgagttgcgcctccatctgtgggcagcacggagcctctgtaggcaacacagggaggaagcaggtgcagatctggctgggcctgcttgcctggcaattgggaaagccaccccttttatggctcctcccccgtcttttcatgactgttgcagctcaccagctgcagctgtagagtagagcttcttcctctagaagggagctttcctccctctgctaggacttgggggaggcttatggaccctcactttgggagctatgagccagggctgtgccaagcatctcatgagctcaagtgcctgccactgcttgacctgcttggtctactggcattgtgattgggtcaggcccagtgactctgagttggctggaagacactcagatttagtgaggactcattatagccaccacttcggtctagcctgggcctggagggacggatgtgggcataccctgagtttagacaggtagccccggcccctttcagagtttctctgtgagtccccttagagctttgtttcaaaggctgggaagctgttctgtcctgccttggcagtccaggactgggtgtgtggtgcggggaggtggaagtccgtgcacccctaggggctttccttgcctcaggggtcccccagccaggccacagcaggcagagctgaggccctacagtcagtctgagaggcctccctgctttcagatacagggtggggtgatgggtgaccatggatcctgaacaggccagaggcccctgttcccaagttgcagcttttacttcctggaggcctccctgactgccgggtgtttgtgttgttcacattcctgtgtatagggactccgcctccatctgcagcctcccctcgtgccctgtctccagcacgcctggctgcccaggtcagcgcacatgcaagtgggtggaatgaggccacggctggctgaacgctggtctgagcttaggaaaagaaaaactggtacacagttcagtgtcataaaagggaaagcagaacatgtcatctccgagttgccaacctgctgactcactttagactaggtcagtgcccacaggcctgatcagcacttggaggatggtagagtttacaggcaaggaagcatcataaatcaccctgtgggtatgtgccgccttactccctggtgaggaaagcaaaaaaaacaaaacatagcttggatgtgtggttcccagatgtagcaaaaataaagagaaacaataaaagccaaggcaagcaaactgggcaacatagcaagaccccatctgtataaaaagtggaaacatttttagcccaggcgtggtgggacgtgcttgtagttccagctatgcaggaggctgacataggaggatcacttgaacccaggaggtggaggttgtagtgagccaagactgtaccactgcactccagcctgggtgacagaatgagaccctacttcaaaaaaaaaaaaaaggaaaaatttgccaggcatgaggcatggtggcgcatacctgtagtcccagctactccaaaggctgaggcgggaggattggttgagcctgagaggttgaggctgctgtgagccgtgatcatgccattatactccagcctgggcaacagagtgagaccctgtctcaaaaagaaaaaaaaagagccaaggcagggatgggagtcacagtgattacaatgatgataaccgggtagagatgcgggactgtggactgggcccctggctggggtctggcaggggcctggtggtgaacatgctgcccaaccagctggcattcctaagcacagactgaccagagccttctccctgcaggagacaacaaccggatcccagtcatcgggcccctgaagatccgggagcagcagcggtcagctgtctccaccagctggctgctgccctacaactacacatggtcacctgagaaggtgttcgtgcagacacccacaatcaactacacactgcgggactaccgcaagttcttccaggacatcggctttgaagatggctggctcatgcggcaggacacagaagggctggtggaagccacgatgccacctggcgtgcagctgcactgcctctatggtactggcgtccccacaccagactccttctactatgagagcttccctgaccgtgaccctaaaatctgctttggtgacggcgatggtactgtgaacttgaagagtgccctgcagtgccaggcctggcagagccgccaggagcaccaagtgttgctgcaggagctgccaggcagcgagcacatcgagatgctggccaacgccaccaccctggcctatctgaaacgtgtgctccttgggccctgactcctgtgccacaggactcctgtggctcggccgtggacctgctgttggcctctggggctgtcatggcccacgcgttttgcaaagtttgtgactcaccattcaaggccccgagtcttggactgtgaagcatctgccatggggaagtgctgtttgttatcctttctctgtggcagtgaagaaggaagaaatgagagtctagactcaagggacactggatggcaagaatgctgctgatggtggaactgctgtgaccttaggactggctccacagggtggactggctgggccctggtcccagtccctgcctggggccatgtgtcccccctattcctgtgggcttttcatacttgcctactgggccctggccccgcagccttcctatgagggatgttactgggctgtggtcctgtacccagaggtcccagggatcggctcctggcccctcgggtgacccttcccacacaccagccacagataggcctgccactggtcatgggtagctagagctgctggcttccctgtggcttagctggtggccagcctgactggcttcctgggcgagcctagtagctcctgcaggcaggggcagtttgttgcgttcttcgtggttcccaggccctgggacatctcactccactcctacctcccttaccaccaggagcattcaagctctggattgggcagcagatgtgcccccagtcccgcaggctgtgttccaggggccctgatttcctcggatgtgctattggccccaggactgaagctgcctcccttcaccctgggactgtggttccaaggatgagagcaggggttggagccatggccttctgggaacctatggagaaagggaatccaaggaagcagccaaggctgctcgcagcttccctgagctgcacctcttgctaaccccaccatcacactgccaccctgccctagggtctcactagtaccaagtgggtcagcacagggctgaggatggggctcctatccaccctggccagcacccagcttagtgctgggactagcccagaaacttgaatgggaccctgagagagccaggggtcccctgaggcccccctaggggctttctgtctgccccagggtgctccatggatctccctgtggcagcaggcatggagagtcagggctgccttcatggcagtaggctctaagtgggtgactggccacaggccgagaaaagggtacagcctctaggtggggttcccaaagacgccttcacgctggactgagctgctctcccacagggtttctgtgcagctggattttctctgttgcatacatgcctggcatctgtctccccttgttcctgagtggccccacatggggctctgagcaggctgtatctggattctggcaataaaagtactctggatgctgtaaggtg

SEQ ID NO: 817 - DNA, 384 bp, Homo sapiens
tatggtgctggcatataaccagctgtcaggtctttgcccactctgttcgcccctgcttcctggcgcagggagtccatgtcctctctggttccccaggtttgcgagagtggagggggaccacgagctcccgatgcctctcctgctctgcaggggaacttgcagatggcccatggcgcagggtcgagactcaagcccactcccaaccccgcgcccgaactgcccggactggcggggtgacgctgcactctgcgcccctaaaacgaacagattaacccctctcttgggaactgaacatgctgacctggcctctcccggttccccccgcatctgtaaccccggggcagagttacaggggctgactggccgcacccaggtgccctcggg

SEQ ID NO: 818 - DNA, 3871 bp, Homo sapiens
gaggcaggaccttgtcctattcattaatcttgcccctcaacagttattttcagaggggcaagaagtgtttcagggttcttggcccttgtttgaccagtcgtcctaaccctcatgtcttgggtcattgttgttataatctggggttaccttttggaaggtcatggggtacccttttgcaaaagttatgggccctctccttggaaactgcacacacaccatgcagcttacaattcagggagttcacaggtctacagaatcctggaaactctcatgtccggttctactcattgtagcttcagtggaaccttctagcagtcctttccagctcctccccagctcctcagctctgcttccctccgcccatcaagccctcctcagcccataaggtgggccaggtggcctgtggggataaatcagagtgcccacaagtgcaggggcccaaagacatcccagagcaaacccaagaatccctctacaagccccagcccactcagaaggatgcattttgccccctctgtttatttgtttgtttttaattatgaaagtagggcatggtcattgttgaaaatgtgagaaatgcagagaagttaaaatgatgctttttgtttagggcgctgctgcttctggcttaagatcctaaatcaaagcagctgccagatctggacctaagacttgcttcccatcaccttacataaaagaaagagcactggactaggaatcaaagatctgaattcccatcaaatctctgctattactagcttttatctctatttatttatttatctgtctatctatctagtaccttttgtgaatatgagtgtttctcaccgaggccctcccatctctcttgcccccgatcctggaatggaccaaataccttgtttactgaaggatacagatggcatgtgactgttgagaatcactcaccctcttagagccatggtttcctcttctataaaatagggatgttcgtgcctatttgctaatcatgagtgacaatgacataaggtacataaagctgtactgcatgatgcaaacataacatcatatttgtagggttgttgctaataatactatccatcagcaaagcagtcattcatttactcagtcaaatactgatgcactggtacattcagtttcctcttttgtaaaatggggataaaaataggacttagctcatagggtatttaagattcagtgagttaatatatataaaatacttagagcagtccttggaacatattaagaactcaatacatattagctagttgagcaggctgtagtatttgttccagccaagaaaagactgttctctaacagcacaggaaataaagatggggttaggcacgacacggcagcaggacttaccttctgtctaattcagctggcagtcaaagaaagaattattagaagcctatgagcttgttctcccaaagatctactgagtacagggggatatttaaagaataaaaatccctagacccacttacagtacaggagagacaagaagctgttcacacaataacaagtgctaaattccttgatttttatactgacagctgaagttttagagaagagaaggatcaataaagaccggaatattaaagcagacaggcctaaaagaggattttagatttgataaagaattcctccagttctcagagcagggactttggagggtaacaacttggatttcagtccttgcctgccacttactgattgtatgaccttggaaaagttacttcacttctgtgagcaatgattctctcatctggaaaacaaaacaaaacaaaaaaactaacaagggtgataataatacctacctccctacctcatagggctgatgagaagattaaaaagtacctacataaagcccttctctgcgtgcctggagcatggcaagggctccatgtgaaccactattttttttttttttttttaatgaaaagtcatgggcagcaccaaagctcagaattttggcagtaaggaattatgattctacattgaaatttgccagaaggggagctgactgcctcatgagacatttttgaatgaggccaaaaaaggaaacaagtgtatcctgggattttacgagatgctaggtatgtccttagcacttaatcctcatgactaccctatgatgtaagtactatctgttgtccctattttacagttggccaaggtcacatagctgaaacggacttctgtgtgtcttctaacttttgctttcaggtctggaaaaatgcaatgtaaacctagaccctctttgaaatactgaagatggtaatcttatcccttcctcactttctgttttctaaaataacagtccttgttccttacaatgtctgttttccagattcttagaagactttttgcttattttccataactctttacttgtgatccctgaatgacaccgggggtatagcagagaatgtccatttcctcaaagttcaaaggtcctacaaaaaatagttgctagcctggcatgatggtgtgtgcctgtagcctcagctacctgggaggctgaggcaagaggattgcttgagctgaggagtttgaggctgcagcgagccatgatcacgccactgctctccagcctggatgacaaagcaagatcacatcttaaaataaaataaaataaattttaaaaatatataaaaaataaaaagtggtgccactaagtgtcctggacagcattagagaaagcaagagatagaagagtgcaaacacctgaaaggaaagagatgcgggtcttccctctcccttgagtagccaccggctatccctggagcataggagtaggattttatcccccagcttcggcctccccaggcagcacttcctttctgtgctttgactccaatttggatggtgctcaggcgggaagtaggctggggtgggaggagtttaggggaatatttgtcttctctcctgttttgccctagagattctggccaggaagacaaatggctagtaccacttggtccttttcttttcttcttttgagacagggtcttgttctgttgcccaggctggagtgcagtggcgtgatcgcggctcaccgcagcctcccaggctcaagcattcctctcacctcagcctcctgagtagctgggaccacagctccactaattttgaagtttttttggtagacatgaagtctccctgtgttgcccgggctggtctcaaactcctgacctcaagcagtcctcctgtcttggcctctggaaatgctgggattacaggcgtgagccactgtgctggcctcttttttctttttctttttttttaaggtttttatttgttaaatgggaagtctgtgccatcaactgagcattgtattttctccttagtaagagcctgggtgggccactgggagagaactatacattaaatgtaagtagcctctgggtagagagcccctggctggtttcctttcctttctctccttttctctactttggtgtctggaggcatttcccagactccagtttcttaccaccctcacggattttgctattgtattatcacctcctttatcattcccaaaattgactttatggagactcattaaaagaaaaaatcatcggccgggagcggtggctcacgccacgaaggcgggcgaatcacctgaggtgcggagttcgtgaccagcctgaccaaaacagagaaaccccatctctactaaacaatacaaaattagctgggcgtggtggtgcacgcctgtaatcccagctactggggaggctgagacaagagaatcacttgaacccgggaggcagaggttgcagtgaccaaagatcgcactattgcactccagcctgggcaacaagagcaaaactctatctcaaaaaaaaaaaaaaaaaaa

SEQ ID NO: 819 - DNA, 3872 bp, Homo sapiens
gaggcaggaccttgtcctattcattaatcttgcccctcaacagttattttcagaggggcaagaagtgtttcagggttcttggcccttgtttgaccagtcgtcctaaccctcatgtcttgggtcattgttgttataatctggggttaccttttggaaggtcatggggtacccttttgcaaaagttatgggccctctccttggaaactgcacacacaccatgcagcttacaattcagggagttcacaggtctacagaatcctggaaactctcatgtccggttctactcattgtagcttcagtggaaccttctagcagtcctttccagctcctccccagctcctcagctctgcttccctccgcccatcaagccctcctcagcccataaggtgggccaggtggcctgtggggataaatcagagtgcccacaagtgcaggggcccaaagacatcccagagcaaacccaagaatccctctacaagccccagcccactcagaaggatgcattttgccccctctgtttatttgtttgtttttaattatgaaagtagggcatggtcattgttgagaatgtgagaaatgcagagaagttaaaatgatgctttttgtttagggcgctgctgcttctggcttaagatcctaaatcaaagcagctgccagatctggacctaagacttgcttcccatcaccttacataaaagaaagagcactggactaggaatcaaagatctgaattcccatcaaatctctgctattactagcttttatctctatttatttatttatctgtctatctatctagtaccttttgtgaatatgagtgtttctcaccgaggccctcccatctctcttgcccccgatcctggaatggaccaaataccttgtttactgaaggatacagatggcatgtgactgttgagaatcactcaccctcttagagccatggtttcctcttctataaaatagggatgttcgtgcctatttgctaatcatgagtgacaatgacataaggtacataaagctgtactgcatgatgcaaacataacatcatatttgtagggttgttgctaataatactatccatcagcaaagcagtcattcatttactcagtcaaatactgatgcactggtacattcagtttcctcttttgtaaaatggggataaaaataggacttagctcatagggtatttaagattcagtgagttaatatatataaaatacttagagcagtccttggaacatattaagaactcaatacatattagctagttgagcaggctgtagtatttgttccagccaagaaaagactgttctctaacagcacaggaaataaagatggggttaggcacgacacggcagcaggacttaccttctgtctaattcagctggcagtcaaagaaagaattattagaagcctatgagcttgttctcccaaagatctactgagtacagggggatatttaaagaataaaaatccctagacccacttacagtacaggagagacaagaagctgttcacacaataacaagtgctaaattccttgatttttatactgacagctgaagttttagagaagagaaggatcaataaagaccggaatattaaagcagacaggcctaaaagaggattttagatttgataaagaattcctccagttctcagagcagggactttggagggtaacaacttggatttcagtccttgcctgccacttactgattgtatgaccttggaaaagttacttcacttctgtgagcaatgattctctcatctggaaaacaaaacaaaacaaaaaaactaacaagggtgataataatacctacctccctacctcatagggctgatgagaagattaaaaagtacctacataaagcccttctctgcgtgcctggagcatggcaagggctccatgtgaaccactatttttttttttttttttaatgaaaagtcatgggcagcaccaaagctcagaattttggcagtaaggaattatgattctacattgaaatttgccagaaggggagctgactgcctcatgagacatttttgaatgaggccaaaaaaggaaacaagtgtatcctgggattttacgagatgctaggtatgtccttagcacttaatcctcatgactaccctatgatgtaagtactatctgttgtccctattttacagttggccaaggtcacatagctgaaacggacttctgtgtgtcttctaacttttgctttcaggtctggaaaaatgcaatgtaaacctagaccctctttgaaatactgaagatggtaatcttatcccttcctcactttctgttttctaaaataacagtccttgttccttacaatgtctgttttccagattcttagaagactttttgcttattttccataactctttacttgtgatccctgaatgacaccgggggtatagcagagaatgtccatttcctcaaagttcaaaggtcctacaaaaaatagttgctagcctggcatgatggtgtgtgcctgtagcctcagctacctgggaggctgaggcaagaggattgcttgagctgaggagtttgaggctgcagcgagccatgatcacgccactgctctccagcctggatgacaaagcaagatcacatcttaaaataaaataaaataaattttaaaaatatataaaaaataaaaagtggtgccactaagtgtcctggacagcattagagaaagcaagagatagaagagtgcaaacacctgaaaggaaagagatgcgggtcttccctctcccttgagtagccaccggctatccctggagcataggagtaggattttatcccccagcttcggcctccccaggcagcacttcctttctgtgctttgactccaatttggatggtgctcaggcgggaagtaggctggggtgggaggagtttaggggaatatttgtcttctctcctgttttgccctagagattctggccaggaagacaaatggctagtaccacttggtccttttcttttcttcttttgagacagggtcttgttctgttgcccaggctggagtgcagtggcgtgatcgcggctcaccgcagcctcccaggctcaagcattcctctcacctcagcctcctgagtagctgggaccacagctccactaattttgaagtttttttggtagacatgaagtctccctgtgttgcccgggctggtctcaaactcctgacctcaagcagtcctcctgtcttggcctctggaaatgctgggattacaggcgtgagccactgtgctggcctcttttttctttttctttttttttaaggtttttatttgttaaatgggaagtctgtgccatcaactgagcattgtattttctccttagtaagagcctgggtgggccactgggagagaactatacattaaatgtaagtagcctctgggtagagagcccctggctggtttcctttcctttctctccttttctctactttggtgtctggaggcatttcccagactccagtttcttaccaccctcacggattttgctattgtattatcacctcctttatcattcccaaaattgactttatggagactcattaaaagaaaaaatcatcggccgggagcggtggctcacgccacgaaggcgggcgaatcacctgaggtgcggagttcgtgaccagcctgaccaaaacagagaaaccccatctctactaaacaatacaaaattagctgggcgtggtggtgcacgcctgtaatcccagctactggggaggctgagacaagagaatcacttgaacccgggaggcagaggttgcagtgaccaaagatcgcactattgcactccagcctgggcaacaagagcaaaactctatctcaaaaaaaaaaaaaaaaaaaag

SEQ ID NO: 820 - DNA, 280 bp, Homo sapiens
tcacgcctgtaatcctagcactttgggaggcggaggcaggcggatcacctgaggtcgggagttcgagaccagcctgaccaacatggagaaaccccgtctctactaacaatacaaaaaaattagccgagcatggtggcgcatgcctataatctcagctacttgggaggctgaggcaggagaatcgcttgaacctgggaggcggaggttgcagtgagccgagatcgcgccattgcactccagcctgggcaacaaaagcgaaactcggtctcaaaaaaaaaaa

SEQ ID NO: 821 - DNA, 6654 bp, Homo sapiens
  misc_feature (554)..(554): n equals a,t,g, or c
  misc_feature (640)..(640): n equals a,t,g, or c
  misc_feature (650)..(650): n equals a,t,g, or c
  misc_feature (953)..(953): n equals a,t,g, or c
  misc_feature (1019)..(1019): n equals a,t,g, or c
gaaactgtcttctactgactgtttcaaaaccgaggccttcacatccccggaggccctgcagcctggggggactgccctggcgcctaagaagaggagccggaaaggccgggcaggggcccatggactctccaaaggcccgctggagaagcggccctatcttggcccggctctgctcctgactccccgagacagggccagtggcacacaaggggccagtgaggacaactctggtggaggaggcaagaagccaaagatggaggagctgggcctggcctcccagcccccggagggcaggccctgccagccccagacaagggcacagaaacagccaggccacaccaactacagcagctattccaagcggaagcgcctcactcggggccgggccaagaacaccacctcttcaccctgtaaggggcgtgccaagcgacgacgacagcagcaggtgctgcccctggatcccgcagagcctgaaatccgcctcaagtacatttcctcttgcaagcggctgaggtcagacagccggacccccgccttctcacccttcgtgcggngtggagaagcgagacgcgttcaccaccatatgcactgttgtcaactcccctggagatgcgcccaagccccacaggaagccttcctnctctgcatcntcttcctcatcctcgtcatcgttctccttggatgcagccggggcgtccctggccacactccctggaggctccatcctgcagccgcggccctccttgcccctctcctccacgatgcacttggggcctgtggtttccaaggccctgagtacctcttgccttgtttgctgcctctgccaaaacccggccaacttcaaggaccttggggacctctgtgggccctactaccctgaacactgcctccccaaaaagaagccaaaactcaaggagaaggtgcggccagaaggcacctgtgaggaggcctcngctgccgcttgagagaacactcaaaggtcccgagtgtgcagctgccgccactgccgggaagccccnccaggcctgacggcccagctgacccggccaagcagggcccactgcgcaccagtgcccggggcctgtcccggaggctgcagagctgctactgctgtgatggccgggaggatgggggcgaggaggcagccccagccgacaagggtcgcaaacatgagtgcagcaaggaggctccggcagagcccggcggggaggcccaggagcactgggtgcatgaggcctgtgccgtgtggaccggcggcgtctacctggtggccgggaagctctttgggctgcaggaggccatgaaggtggccgtggacatggtaagaggccagcccagccagggtggggagtgtggggttccaaaggacaggcaggcaggcagtcggggagccccttgtttctagtgctacagtgtgggccaaatgtgtctgcagtctcgggacaatctgcagagtcctgagcctctctggggtgtgtgggggaagtggaggcacccatctggctaaggcaggtcacactcacctaccctgtcccaggagacttcccgccggggcccgtatgcccagccaccgccactctcccactcacctggcatcttcaggctccagccccacccagaatccactgggcccctccccatgctgtcaccggagatgccaaggcccagagaacacgaggactcccaagattgaacatcagggctgccccgggcggtgcaagagcaagttgcccaccctctgttcctgtctccattgcctctgggatgaagctaagggctcaggaagaccctctctggcgacacaggcttggtgcatggacccagtcacagggttcctccctctgcaggacagtccatggggtcacacagtcacaacaggcagggcggggcagatccagaccctctcaccattggctctgagaccagctttggaagccatagtcactgagcaccaacatgagagagggaactctggggctgtgccgccatgcacctttggggctgtgacctgccctctctgtgcctccgtcccctcgcccctaacgtgggtatgagggtgcccatggaggaggggtcgggagggttaaaaggtgggcacctctgagcccaccgagcacagcagccctgtgatagtcagtgcagaggggcctggtggctctggtgacagcagggtgacgttcttcgtggtgtcaccacttccccagtaccatagagtacctctgtgcccttctgagggaggggtcagtgggggcggtggggtgcacctctcccccggggccatgcttctgcccccacattcaaccccgactccactgcctcatccagacttccgtggagtgacgctcccggctctcagcgctgtgtggtggctctcagtggggacgcctgcagccttctctggcccctgccctgagtcccatcccctccactccttccttcaacccactatgtgcggctgaggtcacaggggagccagaggggcttggcaggggtctccagaggccctggacaaacactgcctgcatctgagtgattcagtgacccagcacagtggccccagccggtggcttcgcccctccccctgcccagcctcctcccccgtcgctgcactgcccacctgctcctcgcagtacacccctgcagcccctctgagcagcccctgctcctgacagttgccgtggcattgcctggccaaaccaaggtcccggtgggggcccactgtgtttgccacccacgcctcctagtgtgtgtcttgggcacctgcttcccactgcccatggggatggctggagaccttctccacgcccagacgccctgcccacctcactccaccctccacctcagaggaaggctggccccgacaggactcctgcaggttcctggtgccgcgggccttgcttacccagcagatggtggccttgggcctcttccctctccccttcccagttagtgattttttgcctctctcctgctttctgtctctctctgtctctctctctctctctctctctctctctctctctctctctctctctcattactggctccttcccagcgccttgaaacaggttcaagtctctcccgtcatcaaaaaataataaccctcagatcaccagccccagctggctgccacctcccctgcttcacagccccattcctgaaagccttgtccccacggcatcctcggtcccgcagcctcaccaggggctccccgacactcacgtcccaccaggctgagatcaggtcgtctccacatcccctgcagccagcactggccggccgaagggaggaggggtcagccccgagcaccgaccaccccatcctgtccctggcccatgggtgtcttaaccgcccatgcacacacaaggtcctgctggactgaggagacagtgtgtgttggagaggcgctagcttccctacaccacgcgggggctggaacttgccagcccagcccatgcctgtctgctgtgccatgctccagaaatggcctgacagcctgcgcaactagggctgccccgggaaggtcggaaccaggaacaccctgccagacagatgggacatcctgggagaatgggcagagtctggggcttcccagggtcacttttggctcaccaccccttcctgcctcagtggcttgggggcgccatgctccttggagtgagaccctggttcaaatcccagctctgccgagggctggttccatagctccaggcgagtcacgcatgctctgagaactccacaatgtcaaaccccgttagcaggattgtggggttctgtggatcatgtgggacctgcctggcatgtggaaggggcttggggtgcagctgtgtccctggccccagcactgccacacccctcggtaccttgacctcacttttgcgctctggagggcagaacctctgagccagctctcagggataccttttttcctcgatggccttttctgggaactgccctcgcctgctatctctgagccctgcctgcccttcccccaaagccatcatagacccctacctcctatccagatggagcctggccatggaatgcttggggtgagagggacccatagcgggctccgggcattgttagggggctaggtggtgtctgcagaggccccacctgtggcagggtttacatgccgccacccctgccctcctcttgggtagctggggtcagaagggcctgaggcctcactctctctgcatcttagtttcttcacatctaaaatgctattcatatgcctgcctgagggtggttggggcctccgtgcagtaagtggagagaagccttcagccagaggacccccatatgcttaaacatccagacaccaagggccactcacagacagcagccggcttgtgtttcgtcatcccttttgggtcaggaactggggacgctggactccagatctccaggaggccatcccagactaggcgggaaggaggcctcagccctgagctgaaaacctgaaattctagaataaaccccaggccccactcccagcatgggcagcggggaggggagtgttctgacatttctcagctgctgtggttgggatggtgcgcccaccctgagcatgtggggtcctgtgggcccctactccagcctggaggcagctgcaggggtcagagaccagcctggagccctcgggcaggttactcagcctcagctctcattggtaacccaggtaaaataacagtaatcccatcataaggttgctgtgggcatgaggcttccagccatgcctggcacataggaagctattgtcgtttgtttcactggcttcgcacttgggcagaggccgccgccctctctgctgccttctctacctcaccccccgcccccagcacggtggcactgtggctctggcgcctggtgacttctccctccccggcctcaggtttgcttcactcttccaagggccttcttggtgtgactgtcctgtcctggccacgtccactccaagcagctggtccaggtgtggggcagcccccaagctcagcagaggacagttttgagacttagaggaggacggcatcagatttacatgaagtcagccatctcaagggattaccacgtcaccgcctcctctcacaggtctgagagctggtcccctggagggtgcaggtctcatcctaggtagaacagtcccagcctagcttcaaagtgctcctgctgccagaaagggtagaaaaccatgctgaatgccttcactgttgcctggaatgggagcctcagtttcaccatctgtaaagtgagattaatgaaagggacccacagagggctgttagagccagtaggcggccaggcgcggtggctcacgcctgtaatcccagcactttgggaggctgaggtgggcggatcacgaggtcaggagatcgagaccatcctggctaacacggagaaaccccgtctctactaaaaatacaaaaaattagcctggcgtggtggcgggcacctgtagtcccagctactggggaggctgaggcaggagaatggcgtgaacccgggaggcggagcttgcagtgagccaagattgtgccactgctctctagcctgggcaacagagcaagactccatctcaaaagcaaaagaaaaaagagccagtaggccaggcgctatgtcttacacctgtaatcccagcactttgggaggcctaggcaggcagatcacctgaggtcgggagttcgagaccagcctggccgacacagtgaaactccgtctctactaaaaatacaaaaattagctgggcatggcagcacatgcctgtaatcccagctactcgggaggctaaggcaggagaatcacttgaacacaggaggcagcggttgccgtgagcggagatcacaccattgcactccagccccggggggacagagtgaaattctgtctcaaaaaaaaaaaaaaaaaaaaaaagcaagccagtgggcaaggacacacaccacgcccagcacaccagaagcatgcagcagatgctggctggtagccacagccatggtagtaactggcatcactggcccaagggggtctccctacccaatgtaccagcccagagggtgctaaatgacccatgtttgtgggcatgtgtaccccagtgctgaacctccttctggtagattttcaagcaccattttggagaagggaggcagggaccacagggggccagccagcctgtacaggttttttgtgttttttttgtttgtttgtttgtttgttttttgaggcagggtctcactcttgcccaggctggagtacaggcagtggcgtcatctcggctcactgcagcctcaacctcccaggctgcagcaatcctcccacctcaccttcctgagtagctgggactacaggcacacaccaccaaccctcactattttttgtagagacagtttcaccatgttgcccaggctggtatcaaactcctggactcaggcgatcctcccaccttggcctcccagagtgctgggattacaggcatgagccactgcacctggcctaccagcctgtaaagcttgagggctgggctccaactggagactcacctgcctttcctttctcttcatcagatgtgttccagctgccaagaagccggggccaccattgggtgctgccacaaaggatgcctccacacctaccactacccgtgtgccagcgatg

SEQ ID NO: 822 - DNA, 6650 bp, Homo sapiens
gaaactgtcttctactgactgtttcaaaaccgaggccttcacatccccggaggccctgcagcctggggggactgccctggcgcctaagaagaggagccggaaaggccgggcaggggcccatggactctccaaaggcccgctggagaagcggccctatcttggcccggctctgctcctgactccccgagacagggccagtggcacacaaggggccagtgaggacaactctggtggaggaggcaagaagccaaagatggaggagctgggcctggcctcccagcccccggagggcaggccctgccagccccagacaagggcacagaaacagccaggccacaccaactacagcagctattccaagcggaagcgcctcactcggggccgggccaagaacaccacctcttcaccctgtaaggggcgtgccaagcgacgacgacagcagcaggtgctgcccctggatcccgcagagcctgaaatccgcctcaagtacatttcctcttgcaagcggctgaggtcagacagccggacccccgccttctcacccttcgtgcgggtggagaagcgagacgcgttcaccaccatatgcactgttgtcaactcccctggagatgcgcccaagccccacaggaagccttcctcctctgcctcctcttcctcatcctcgtcctcgttctccttggatgcagccggggcctccctggccacactccctggaggctccatcctgcagccgcggccctccttgcccctctcctccacgatgcacttggggcctgtggtttccaaggccctgagtacctcttgccttgtttgctgcctctgccaaaacccggccaacttcaaggaccttggggacctctgtgggccctactaccctgaacactgcctccccaaaaagaagccaaaactcaaggagaaggtgcggccagaaggcacctgtgaggaggcctcgctgccgcttgagagaacactcaaaggtcccgagtgtgcagctgccgccactgccgggaagccccccaggcctgacggcccagctgacccggccaagcagggcccactgcgcaccagtgcccggggcctgtcccggaggctgcagagctgctactgctgtgatggccgggaggatgggggcgaggaggcagccccagccgacaagggtcgcaaacatgagtgcagcaaggaggctccggcagagcccggcggggaggcccaggagcactgggtgcatgaggcctgtgccgtgtggaccggcggcgtctacctggtggccgggaagctctttgggctgcaggaggccatgaaggtggccgtggacatggtaagaggccagcccagccagggtggggagtgtggggttccaaaggacaggcaggcaggcagtcggggagccccttgtttctagtgctacagtgtgggccaaatgtgtctgcagtctcgggacaatctgcagagtcctgagcctctctggggtgtgtgggggaagtggaggcacccatctggctaaggcaggtcacactcacctaccctgtcccaggagacttcccgccggggcccgtatgcccagccaccgccactctcccactcacctggcatcttcaggctccagccccacccagaatccactgggcccctccccatgctgtcaccggagatgccaaggcccagagaacacgaggactcccaagattgaacatcagggctgccccgggcggtgcaagagcaagttgcccaccctctgttcctgtctccattgcctctgggatgaagctaagggctcaggaagaccctctctggcgacacaggcttggtgcatggacccagtcacagggttcctccctctgcaggacagtccatggggtcacacagtcacaacaggcagggcggggcagatccagaccctctcaccattggctctgagaccagctttggaagccatagtcactgagcaccaacatgagagagggaactctggggctgtgcgccatgcacctttggggctgtgacctgccctctctgtgcctccgtcccctcgcccctaacgtgggtatgagggtgcccatggaggaggggtcgggagggttaaaaggtgggcacctctgagcccaccgagcacagcagccctgtgatagtcagtgcagaggggcctggtggctctggtgacagcagggtgacgttcttcgtggtgtcaccacttccccagtaccatagagtacctctgtgcccttctgagggaggggtcagtgggggcggtggggtgcacctctcccccggggccatgcttctgcccccacattcaaccccgactccactgcctcatccagacttccgtggagtgacgctcccggctctcagcgctgtgtggtggctctcagtggggacgcctgcagccttctctggcccctgccctgagtcccatcccctccactccttccttcaacccactatgtgcggctgaggtcacaggggagccagaggggcttggcaggggtctccagaggccctggacaaacactgcctgcatctgagtgattcagtgacccagcacagtggccccagccggtggcttcgcccctccccctgcccagcctcctcccccgtcgctgcactgcccacctgctcctcgcagtacacccctgcagcccctctgagcagcccctgctcctgacagttgccgtggcattgcctggccaaaccaaggtcccggtgggggcccactgtgtttgccacccacgcctcctagtgtgtgtcttgggcacctgcttcccactgcccatggggatggctggagaccttctccacgcccagacgccctgcccacctcactccaccctccacctcagaggaaggctggccccgacaggactcctgcaggttcctggtgccgcgggccttgcttacccagcagatggtggccttgggcctcttccctctccccttcccagttagtgattttttgcctctctcctgctttctgtctctctctgtctctctctctctctctctctctctctctctctctctctctctctctcattactggctccttcccagcgccttgaaacaggttcaagtctctcccgtcatcaaaaaataataaccctcagatcaccagccccagctggctgccacctcccctgcttcacagccccattcctgaaagccttgtccccacggcatcctcggtcccgcagcctcaccaggggctccccgacactcacgtcccaccaggctgagatcaggtcgtctccacatcccctgcagccagcactggccggccgaagggaggaggggtcagccccgagcaccgaccaccccatcctgtccctggcccatgggtgtcttaaccgcccatgcacacacaaggtcctgctggactgaggagacagtgtgtgttggagaggcgctagcttccctacaccacgcgggggctggaacttgccagcccagcccatgcctgtctgctgtgccatgctccagaaatggcctgacagcctgcgcaactagggctgccccgggaaggtcggaaccaggaacaccctgccagacagatgggacatcctgggagaatgggcagagtctggggcttcccagggtcacttttggctcaccaccccttcctgcctcagtggcttgggggcgccatgctccttggagtgagaccctggttcaaatcccagctctgccgagggctggttccatagctccaggcgagtcacgcatgctctgagaactccacaatgtcaaaccccgttagcaggattgtggggttctgtggatcatgtgggacctgcctggcatgtggaaggggcttggggtgcagctgtgtccctggccccagcactgccacacccctcggtaccttgacctcacttttgcgctctggagggcagaacctctgagccagctctcagggataccttttttcctcgatggccttttctgggaactgccctcgcctgctatctctgagccctgcctgcccttcccccaaagccatcatagacccctacctcctatccagatggagcctggccatggaatgcttggggtgagagggacccatagcgggctccgggcattgttagggggctaggtggtgtctgcagaggccccacctgtggcagggtttacatgccgccacccctgccctcctcttgggtagctggggtcagaagggcctgaggcctcactctctctgcatcttagtttcttcacatctaaaatgctattcatatgcctgcctgagggtggttggggcctccgtgcagtaagtggagagaagccttcagccagaggacccccatatgcttaaacatccagacaccaagggccactcacagacagcagccggcttgtgtttcgtcatcccttttgggtcaggaactggggacgctggactccagatctccaggaggccatcccagactaggcgggaaggaggcctcagccctgagctgaaaacctgaaattctagaataaaccccaggccccactcccagcatgggcagcggggaggggagtgttctgacatttctcagctgctgtggttgggatggtgcgcccaccctgagcatgtggggtcctgtgggcccctactccagcctggaggcagctgcaggggtcagagaccagcctggagccctcgggcaggttactcagcctcagctctcattggtaacccaggtaaaataacagtaatcccatcataaggttgctgtgggcatgaggcttccagccatgcctggcacataggaagctattgtcgtttgtttcactggcttcgcacttgggcagaggccgccgccctctctgctgccttctctacctcaccccccgcccccagcacggtggcactgtggctctggcgcctggtgacttctccctccccggcctcaggtttgcttcactcttccaagggccttcttggtgtgactgtcctgtcctggccacgtccactccaagcagctggtccaggtgtggggcagcccccaagctcagcagaggacagttttgagacttagaggaggacggcatcagatttacatgaagtcagccatctcaagggattaccacgtcaccgcctcctctcacaggtctgagagctggtcccctggagggtgcaggtctcatcctaggtagaacagtcccagcctagcttcaaagtgctcctgctgccagaaagggtagaaaaccatgctgaatgccttcactgttgcctggaatgggagcctcagtttcaccatctgtaaagtgagattaatgaaagggacccacagagggctgttagagccagtaggcggccaggcgcggtggctcacgcctgtaatcccagcactttgggaggctgaggtgggcggatcacgaggtcaggagatcgagaccatcctggctaacacggagaaaccccgtctctactaaaaatacaaaaaattagcctggcgtggtggcgggcacctgtagtcccagctactggggaggctgaggcaggagaatggcgtgaacccgggaggcggagcttgcagtgagccaagattgtgccactgctctctagcctgggcaacagagcaagactccatctcaaaagcaaaagaaaaaagagccagtaggccaggcgctatgtcttacacctgtaatcccagcactttgggaggcctaggcaggcagatcacctgaggtcgggagttcgagaccagcctggccgacacagtgaaactccgtctctactaaaaatacaaaaattagctgggcatggcagcacatgcctgtaatcccagctactcgggaggctaaggcaggagaatcacttgaacacaggaggcagcggttgccgtgagcggagatcacaccattgcactccagccccggggggacagagtgaaattctgtctcaaaaaaaaaaaaaaaaaaaaaaagcaagccagtgggcaaggacacacaccacgcccagcacaccagaagcatgcagcagatgctggctggtagccacagccatggtagtaactggcatcactggcccaagggggtctccctacccaatgtaccagcccagagggtgctaaatgacccatgtttgtgggcatgtgtaccccagtgctgaacctccttctggtagattttcaagcaccattttggagaagggaggcagggaccacagggggccagccagcctgtacaggttttttgtgttttttttgtttgtttgtttgtttgttttttgaggcagggtctcactcttgcccaggctggagtacaggcagtggcgtcatctcggctcactgcagcctcaacctcccaggctgcagcaatcctcccacctcaccttcctgagtagctgggactacaggcacacaccaccaaccctcactattttttgtagagacagtttcaccatgttgcccaggctggtatcaaactcctggactcaggcgatcctcccaccttggcctcccagagtgctgggattacaggcatgagccactgcacctggcctaccagcctgtaaagcttgagggctgggctccaactggagactcacctgcctttcctttctcttcatcagatgtgttccagctgccaagaagccggggccaccattgggtgctgccacaaaggatgcctccacacctaccactacccgtgtgccagcgatg

SEQ ID NO: 823 - DNA, 460 bp, Homo sapiens
aggctggagtgcagtggtgcgatcttggctcactgcaacctccgcctcccgagttcaagcgattctcctgcctcagcctctcaagtagctgggactacaggcgtgcaccaccacgctcagctaatttttgtattttttgtagagatggggtttcactgctttggacaggatggtctccatctcttgacctcgtgatccgcccgcctcagctgcctaaagtgctgggattacaggcgtgagccactgtgcccggcccctagtagcgtttttaatgtgtggtcttgagcaagttggttgatacctctgcacacagtttccctacctgtatgatggagatgataatagccccttctctgcagagctgctgggaggagagtgaaataatgaacactacccacacggtgctgcctcagtcctattttgggtccagcctctgtgacctctccccacacggtgctgc

SEQ ID NO: 824 - DNA, 400 bp, Homo sapiens
accctcttcaagaggatgtcttctcccaagaaagccaagcccaccaagggcaatggcgagcctgccacaaagctcccacccccggagacccccgatgcctgcctcaagctcgcctctcgggcagccttccagggggccatgaagaccaaggtgctgccaccccggaagggccggggcctgaagctggaagccatcgtgcagaagatcacctcgcccagcctcaagaagttcgcatgtaaagcgccaggggcctctcctggtaatcctctgagcccatccctttccgacaaagaccgtgggctcaagggtgctgggggcagcccagtgggggtggaagaaggcctggtaaatgtgggcaccgggcagaagctcccaacttctggggctgatccgttatgca

SEQ ID NO: 825 - DNA, 400 bp, Homo sapiens; identical to SEQ ID NO: 824

SEQ ID NO: 826 - DNA, 460 bp, Homo sapiens; identical to SEQ ID NO: 823

SEQ ID NO: 827 - DNA, 1438 bp, Homo sapiens
gcccatatcacttaaaaagttcaaagccaaacaatgtttaacctctccttttttacattgtatggactttgtatgctgaagcttcattcagcctcctcctggttcacattgttattgttaatatcattatttttgtctgtcgtttattgtcagtctacaaattagatattattattgtttttgttttatacaggcaacatttatctggatttgcatagatgtttaccattttctttactcagtgttttatcaaatacatcctttaggaattcctttaatttggtctcttgttggcgtatgttcagttttcatttgtctattaaatgtttatcacttttttcgtgataggttgttctgctgggttcacaattttaggttgccagttctgtttttttgtttgtttgtttgtttgacacttggaagatattattctagtgtcttcaatattctgtctttggtctttggtcattctaattaccttttctttgtatatgatctgtcccttctccatggcttcttttaaaatcttctctttatctttggtgtttttcagttaaatatgtaatagaactaggcactgatttgtttatatttatcctgctcgagacacatgatgtttcatgtatctgtggctttttatagtttaaaataatttctggaaaagtcatagtcattatctctttaaccgctccctctcttccattctctttgttctctcttcctcgaactcctgttagtcatttgatcctccatatctctgaatatttttgtatttcttttattatttatttcttgtctctgctacattttacattgagtaaaagtgggatgtgacagtgggaaatcattagtgacttagaaattccagttggtcattgggccaattttgatgctaccttctctcttttatttctcactttaaaataaaatttgcaaaaacaaaaaattaaatatagtatgagtccagttactggcctaaggagctaaaagcattctgggtttgtatgaagacagctgagttataacaaatgagagtactgttgtgtgactgcattaattattccctttttaaatgtacaagagcaaggcattctacctgactgtgttattgagctctgcagcatacatgtgacagagctaaaacaaacaagcaaacaaaagaaaccacagctttaggatactctgttcatgaatatagcctgaaaatgataatcaagaagtaaacttttaccagtattaaggaacattaagctgcctatctctcagtgaatttcagaatgatattttaaaagttagtttaggctgggcactgtagctcatgcctataatcccagcactttgagaggcagaggccaaggcaggaggatcacttgagccccggattttgagaccagcctgggcaacatagcaagacactgtctctaaaaaaaaataaaaa

SEQ ID NO: 828 - DNA, 329 bp, Homo sapiens
aggaaatgaaacccttctgaaaattggtgaatgcagtcctgtcagagatttagatttttgaagatgctgatacatagaagattggaagacatgaatatcttaaatgttaactacttttaattcattggtctaagactcagtgttaactgtcatgtataagattttattatttgttttatgttgcttctgtatataccttgaggtgtttaagaaaatatcttgtttcaaactgggattgaaggaagttatctgcagtctttaaaaaaaaattcttagaataattaagagaaatcattattattgtaccaagcctgtggttaagaagaaat

SEQ ID NO: 829 - DNA, 2979 bp, Homo sapiens
tttcagaggaccttatcatgtccttcactgtatccatggcaatcgggctggtacttggaggatttatttgggctgtgttcatttgtctgtctcgaagaagaagagccagtgctcccatctcacagtggagttcaagcaggagatctaggtcttcttacacccacggcctcaacagaactggattttaccgccacagtggctgtgaacgtcgaagcaacctcagcctggccagtctcaccttccagcgacaagcttccctggaacaagcaaattcctttccaagaaaatcaagtttcagagcttctactttccatccctttctgcaatgtccaccacttcctgtggaaactgagagtcagctggtgactctcccttcttccaatatctctcccaccatcagcacttcccacagtctgagccgtcctgactactggtccagtaacagtcttcgagtgggcctttcaacaccgcccccacctgcctatgagtccatcatcaaggcattcccagattcctgagtagggtggcttttggtttttgtttctttcttgtcttgtcttttattgaaaggaaatcaaaaataggctaaacagaattttgagggcatggcccaaataactcatgagttccaagttgaaacatggttgtgcaagttggacattacaatgtaaaacacattttcttcaaacacgttttcccttttgtttcaaaaaatgtaatattttcccccaagcgttttatatttatgtattttgtattcaatgtgaggcttattaaaaatagtgattctaatgtaagaatcagctaagatgcattatatatattttaattaaaattaaaacttcagatatttgtggattacaatcctcatttacttccaatgtgactaaaaagagaaaaaaaatcactgtgtcactttaaagaaaaatcttctaagggatttggattttactttctttagaatgacaagtgaatcatattgacattttacaatcttagatttttctttttttttcttttgagacagggtcttgatccgtcgcccaggcgggagttgcagtagcatgatcaggactcactgcagcctctatctcccaggctcaagtaatcctcccatcttagtgccccaagtagctgggactacaggggtgcactaccacaccgggttgaatttttttttaattttagtagagatgaagtgtcactatgttaccaaggctggtctcaaactcctaaactcagatgatcctcctgcctcggcctcccaaagtgctggaattagcctggccaatcttggatttttaatggaatatgtgggcacaaaatgacagaacataggacattctaaagttccttgatttgatcattataagaagtgtgggactcaagcacaggaaactgaactcttttggtgtcattggatgtttcatttttgacactaattttttctggacaaactctttatgtgtttttcccaagaatagttatctacttcctggaggcaaaatccttggatttactaacatgatgatttaccttttcttcaccgttgtcgttacattgttagaaaagcaacaggaaaaaatccaattcatttgacctaaaaacaagcctcaagtttaaaaccaagctcacgtttttcttaagggaaaaattttctttcttaaacttacatctagcaacttggaaagcactttctctggggatcttcttttgtaactttgcagacaaataagtatgagtcactggggagagagtttgttattgaaatagatgttgcccatgaagaattctccttcctggattgactcttaatcatcaggcatcattcctggtttgcttctctacgaatctcaattccaacttctctgcagagtctgtacagtgattaagccatgccagatggtctttggtgcacacagttatttaagaatccacttccacaggtggctgcccttgtaaggaagaatgcatccctaaatgtggccaccagagagttccagtgggcagatgtctgtggctgcccttctcatttaaggacatgagttcactggagtattactcaaaaagtctgtggttcatttccagtattgtgaatatttagtttatgtggccgtttctttgtttctttgaacagtgggattttcagtgaaaaagtaccctctttttcatttcctattgcagtggtcacagctaatagtgtctgaacatggttcaagaataagagattccatgtagcattttctttattattttcatttcccttatattatccatcattccttaaggacaattattcttaataatgcttatagaaaatgttctctaattaaacatgccaaaaggaaaaagtaagagaaagagggagcaagaagaaaatggaagaaaaagggaaaaaagctaaccggataaccaatttgttataagttggttttcaacaaagaaatttagcagccaagtaaggtttcaagggaatattaacttggtatcagggctacttttttttttttttttttacttgcatgtcatccttaatgtctaacatgcattaacagcacagagtatggtttttatcaagaatttgtgttgggagtaaaaactgctttatagctcccaaattaggaagagaagagcagaaatcctctggggcatttaaccatctggcagaattgttgctgcacccttatcccagttataagacagtcaaaatgactatggcctaaatattgcgagtgtatgaaatgtgaaattaaagcaaaaactggagactttgaatgtatttatttaattagaaatgctaagcggatcgtgaaataaaaatacatttatgcgacgcggtatccaaaatccatttatgaaataatgccaacactgaacttaaaagcttggacctataacatctctaatcgacattcgctgtgtagggcacattggacgcgcgatggtgctatggaaccctttcttatttaaatgtatcgc

SEQ ID NO: 830 - DNA, 2983 bp, Homo sapiens
tttcagaggaccttatcatgtccttcactgtatccatggcaatcgggctggtacttggaggatttatttgggctgtgttcatttgtctgtctcgaagaagaagagccagtgctcccatctcacagtggagttcaagcaggagatctaggtcttcttacacccacggcctcaacagaactggattttaccgccacagtggctgtgaacgtcgaagcaacctcagcctggccagtctcaccttccagcgacaagcttccctggaacaagcaaattcctttccaagaaaatcaagtttcagagcttctactttccatccctttctgcaatgtccaccacttcctgtggaaactgagagtcagctggtgactctcccttcttccaatatctctcccaccatcagcacttcccacagtctgagccgtcctgactactggtccagtaacagtcttcgagtgggcctttcaacaccgcccccacctgcctatgagtccatcatcaaggcattcccagattcctgagtagggtggcttttggtttttgtttctttcttgtcttgtcttttattgaaaggaaatcaaaaataggctaaacagaattttgagggcatggcccaaataactcatgagttccaagttgaaacatggttgtgcaagttggacattacaatgtaaaacacattttcttcaaacacgttttcccttttgtttcaaaaaatgtaatattttcccccaagcgttttatatttatgtattttgtattcaatgtgaggcttattaaaaatagtgattctaatgtaagaatcagctaagatgcattatatatattttaattaaaattaaaacttcagatatttgtggattacaatcctcatttacttccaatgtgactaaaaagagaaaaaaaatcactgtgtcactttaaagaaaaatcttctaagggatttggattttactttctttagaatgacaagtgaatcatattgacattttacaatcttagatttttctttttttttcttttgagacagggtcttgatccgtcgcccaggcgggagttgcagtagcatgatcaggactcactgcagcctctatctcccaggctcaagtaatcctcccatcttagtgccccaagtagctgggactacaggggtgcactaccacaccgggttgaatttttttttaattttagtagagatgaagtgtcactatgttaccaaggctggtctcaaactcctaaactcagatgatcctcctgcctcggcctcccaaagtgctggaattagcctggccaatcttggatttttaatggaatatgtgggcacaaaatgacagaacataggacattctaaagttccttgatttgatcattataagaagtgtgggactcaagcacaggaaactgaactcttttggtgtcattggatgtttcatttttgacactaattttttctggacaaactctttatgtgtttttcccaagaatagttatctacttcctggaggcaaaatccttggatttactaacatgatgatttaccttttcttcaccgttgtcgttacattgttagaaaagcaacaggaaaaaatccaattcatttgacctaaaaacaagcctcaagtttaaaaccaagctcacgtttttcttaagggaaaaattttctttcttaaacttacatctagcaacttggaaagcactttctctggggatcttcttttgtaactttgcagacaaataagtatgagtcactggggagagagtttgttattgaaatagatgttgcccatgaagaattctccttcctggattgactcttaatcatcaggcatcattcctggtttgcttctctacgaatctcaattccaacttctctgcagagtctgtacagtgattaagccatgccagatggtctttggtgcacacagttatttaagaatccacttccacaggtggctgcccttgtaaggaagaatgcatccctaaatgtggccaccagagagttccagtgggcagatgtctgtggctgcccttctcatttaaggacatgagttcactggagtattactcaaaaagtctgtggttcatttccagtattgtgaatatttagtttatgtggccgtttctttgtttctttgaacagtgggattttcagtgaaaaagtaccctctttttcatttcctattgcagtggtcacagctaatagtgtctgaacatggttcaagaataagagattccatgtagcattttctttattattttcatttcccttatattatccatcattccttaaggacaattattcttaataatgcttatagaaaatgttctctaattaaacatgccaaaaggaaaaagtaagagaaagagggagcaagaagaaaatggaagaaaaagggaaaaaagctaaccggataaccaatttgttataagttggttttcaacaaagaaatttagcagccaagtaaggtttcaagggaatattaacttggtatcagggctacttttttttttttttttttacttgcatgtcatccttaatgtctaacatgaaaaatcagcaaagagtatggtttttatcaagaatttgtgttgggagtaaaaactgctttatagctcccaaattaggaagagaagagcagaaatcctctggggcatttaaccatctggcagaattgttgctgcacccttatcccagttataagacagtcaaaatgactatttcctaaatattgtgagtgtatgaaatgtgaaattaaagcaaaaactggagacttttaatgtatttctttaatttgaaatgttttgtggattgtgaaataaaaataaatttatgtcaagttttattcaaaattcatttatgaaataatgccaacactgttctaaaaagcaaggagtcaagaaattataaaattcagattaaatcaggaaaacacattagatggaaaattatactatagaatttgagcttattaaaatttattgcata

SEQ ID NO: 831 - DNA, 207 bp, Homo sapiens
ggccgggcgcggtggctcacgcctgtaatcccagcactttgggaggccgaggcgggcagatcacctgaggtcaggagtttgagaccagcctgaccaacatggagaaaccctgtctctactaaaaatacaaaattagccaggccgtggtggcacatgcctgtaatcccagctactcaggaggctgaggtaggagaatcgcttgaacct

SEQ ID NO: 832 - DNA, 518 bp, Homo sapiens
atgatttttaaacagatttggcacaggagtgcctttctgggtttagggaagtggtggacaaggcaggagagaaccacattcatcttctcctcttgtgtttgtcttctgtctttcaataacgtccatgaactgtgaggttagtgtcttggctgagagataagtatggcttggcattgattcttctgttgttacctcaagctgttttctagtccccaagaacagcactctcagtgggtgtggaagtgggcgggacatgaagcaatggttttacattgcattgcctggctacagcttggcatttctttcctttttctttttctttgcgtcattgccattggtgccactaattttgcttcccctctcttttataacttgtttcttcgggagttgcctagagtctctgcattatatcttatttggtattgaggcagtgtgttcttggccaataacctaggagatgatatctgttcatcttacaggtttagtgctggaggaattcattaaaaataataataaaa

SEQ ID NO: 833 - DNA, 3598 bp, Homo sapiens
atggggcggccctggccagaagcggaggaggtggcacccgggaccgagctggggtcttggaggaagagagggtgaggggaatacagtactgggggtgagagaagggttggacagaagagggtcgggtatctgggcatgcgcagggccgcaggactcttggtggggtagcgagggggacggtcccacgactgctccgaagggccgggactcccagtgggggcgggacccccggagtgcccgcctgcggactcccaagcctggagcctggggagagggtgggcacctccgttcccgcacacccgtccatggtgtgtgcgccgagcgtccaggagccacggcggtgtcttccttgcgcgtcttttacacgtgtgggggtaggctgctcctcggggctgagccgtggccagggttatggagaggcccgcctctccccagatggcgtcgtcgagccctgactccccatgttcctgcgactgctttgtctccgtgcccccggcctcagccatcccggctgtgatctttgccaagaactcggaccgaccccgggacgaggtgcaggaggtggtgtttgtccccgcaggcactcacactcctgggagccggctccaggtgggttagactttatggggtgctgggaggtgtggcagatctctgcattcttttaagaccttcttccctgctccccacacctgggaggctgccagaagtagtggaagagcatgagctttaggtctaccaacctggacctgagctcattatgtagcctcagtctacctcagtttcctcttctgtaaaatgggaatgagaccttcctcaaagggatctataaggtaattggcagagtgccacactcgaggggccgcccctctatgagtggacgcttcctttctcctccctcacctccagtgcacctacattgaagtggaacaggtgtcgaagacgcacgctgtgattctgagccgtccttcttggctatggggggctgagatgggcgccaacgagcatggtgtctgcattggcaacgaggctgtgtggacgaaggagccagttggggagggggaagccctgctgggcatggacctactcaggtgcagaccctgcccttcctcatctgcctgacacaccagaaatctaggggctgagttttgacctgggcccatccatccctcccccagcctggttcacaggggcctcctcctctctgcagactttgcccttgtgccttcgtgaagaaggctgcagcagcagccacctttgggcctctcctggcccagaaatagagcagtggttatttatttattttcagttgaaatcttacatagagtcccaatttataaaaccagtaatagtggatggagcagctctgggtggagagaggttaggggctcaggacacttctctctctgaaactgtgtttcaggccttttcatggaaccctcaaagcatagcacatggaaccagagcattgaaagccactggcataattgcatttgatacgatcagtgccagcagatttgctgtgtgacttgggcctatcaccaaacctctccgggcctcttctgtcccctggagcttctgccaccagccattgatccctctgtcacccttctgtcccttggccctctcttttgccaggctggctttggaacggagcagctctgcccaggaggccttgcatgtgatcacagggttactggagcactatgggcaggggggcaactgcctggaggatgctgcgccattctcctaccatagcaccttcctgctggctgaccgcactgaggcgtgggtgctggagacagctgggaggctctgggctgcacagaggatccagggtgaggtgttccctttctcccagctttgggaagtgggagagatggtaggggcagggaggggcccgatccaggtgcaagcctgtcaggacatccagggagatgggagatgagcccacttgggaattctcctccccttcacttggttaagtcttccgtgtgctacagcctgttgcttcctctgggaagccttcctggacttccctgggtggtcaggtttcctgcttatatgcaagcaggtacttctttttcatcgcattcaacacagttgcatgcttacatttatctctgtgattattttgtctgcctcccccaccaaaacgtaggctccatgagggtaggtagttctcttctccaccatgttctcagcacctcgcccagtgcctggcatagaatagatgctcaatggtaaatgaaccactccccgatctcctccacagagggggcccgcaacatctccaaccagctgagcattggcacggacatctcggcccaacacccggagctgcggactcatgcccaggccaagggctggtgggatgggcagggtgcctttgactttgctcagatcttctccctgacccagcagcctgtgcgcatggaggctgccaaggcccgcttccaggcagggcgggagctgctgcggcaacggcaaggttagtgaacggtggagggggctgggggccaggagggccacagcagtgccagccactctcccctcccacagcttccccctctactccttggcagggggcatcacggcagaggtgatgatgggcatcctcagagacaaggagagtggtatctgtatggactcgggaggctttcgcaccacggccagcatggtgtctgtcctgccccaggatcccacgcagccctgcgtgcactttcttaccgccacgccagacccatccaggtgggaagaatgagggtggggaaggctggggagaagagaggatctgatatatctccgtgcttccatctgtgcccctctaggtctgtgttcaaacctttcatcttcgggatgggggtggcccaggccccccaggtgctgtcccccacttttggagcacaagaccctgttcggaccctgccccgattccagactcaggtagatcgtcggcataccctctaccgtggacaccaggcagccctggggctgatggagagagatcaggtatcccccagggagtaggggctaccttgaggggatgatagacctcccccactcccagtgggactctggaaatatgaaggaactagggagtggaagagatttcagagctggggagaggagttcctcccttcaaagccagcaactgcctttggggaatgtcggggggtatctcctttctcctgcttgtgtgaggtggtacacagtccccccttcacctggcgggaagcctgtcccggacagactcatctcagctttcccttggggcaggatcgggggcagcagctccagcagaaacagcaggatctggagcaggaaggcctcgaggccacacaggggctgctggccggcgagtgggccccacccctctgggagctgggcagcctcttccaggccttcgtgaagagggagagccaggcttatgcgtaagcttcatagcttctgctggcctggggtggacccaggacccctggggcctgggtgccctgagtggtggtaaagtggagcaatcccttcacgctccttggccatgttctgagcggccagcttggcctttgccttaataaatgtgctttattttctcttcagtgaa

SEQ ID NO: 834 - DNA, 5689 bp, Homo sapiens
tttagaatcaggtggctcactgagctctgtattttgtttcctggagctttcactggtttcttcccctgagataccccaagtgacatgaaaagcatactcagggcctagagacactttactggggatgggcttctgtcacaggtcagaggtctgagaagaggggcaggccccactcctctccactagtagagaaaggttgacagagaatcatttcttgcttctcttggccgtagttttggttgtgctgggggcctcagccacagaggccttgggggctgtggctgctcgtgcccccttccttccccagaaagagctttggtggcccctgggaatcagactgcatggtttcttggtgggagaggaggcctggggtgaggagacggcctcagggactgtctcctccccttgcgcaggagtggcagaagggctgctgtccccagccatgggcaccccaggtagcaggggcaggtcggtgagggtgggctgcatctccatcctcagcaggtgctctgtcagggccgtctgttgccggtgctccctgtgcctgctcagctcctgctccagctccttgaggaagcctgggaggggccgggggtggagggtacagggtgggtggagccctgggctcagcaggagggtccctgggctcagggaagtctctggctggccccttgtcccttgtgggaaggagcctgaggctggggcccaggactgacacctggctctggcccagatgttgatctgaacttggggctcccctccccggacgccactgccaccttagcttccctcatgtcccacagggcagaggtgggctctggggaggctgaaaaccttggaaagcagggtcacctcgttctgagcagaatgggccactcagctctgggaactcctcatcgcttgaggcttcatcctcctcatccgaaatccagcgctccaccacaggctgcccgtccaggtccaggagaagtggcagggcttctgtcaccagctcgctgcagagcagaaggagcagaggttacccaggagggcaccctggcgtggaggatgcaaagacacgcaccacagcactcacacccggaggggtggtggctcatgagctaggtaggaggtgggggagaaggtgtcatggacaggaccccaggtttgcaggctgagaggggtctgggctgagttagcaggtagagctcagccatgacctttcttcccaccctccactccttaccggtagccatcctggttggtgcagctgtttccagacaggttgaggatgagaaggctctgggggaactcatctgcacacagcaaagagagaggaaatggggttctcacttgatcttagccaaaagaccatgaagcgatgggaatggggttctcatacccactttctagtccaaagccagtacctctaggcacaaccccttgaactccctgaggatgaaatgtggacctgcaggggcatggctaatagaagcatgggcagatgggtgcagaggggagggcaggccccacaggggatgtgtttggtgagccagggcgagtgggttcctacccagcttcaatgtttctatcaggttctcagaaaggtccagaaactggaggcatgggaggtcgaggaggttttccacctgcctgatttggtttcctgccagagacaggaagctgtaggggaaggaaggggtacagaggcagagctgaatcatggaacagctggaagaaaagaggagggcacctgacaccggggcccctgggctaggcagctgatgaccagtggggacacatggccttctggggtgagggagtagatctaggcttgctggtccttgactgacaaggacccaggcttggagaaatctgaaccagttctttgggatatggctaggttcccccaacccctcttcccctgcctgagccctggcaccacataccgcaaggaggggatgcaagccaggttctcaatttgctggatcttattctgcaagaagaaaccgaagtggggaaaccaagctgagatcagatgcgtcaggggccctttacggggacaaagccccaagaccatgtctactctgcagctggagatctggcactttgggaatgatcaccccactccttgaacaggttgccactaccttaagaaagatgattttctttccccatgtggatggttaagggtgtaaacctggggtatctaaacctgactacgtatactcttctgattccacaaccaaagagtgacctgggaatcagaaaaggaaactaagaagccaccaggaaaacggaaagggccttggtggtggcttgcatacacagagagaacaatgagcatacaggaacttgacggttaaagtttctatggggaaagttgaagcgagctgggaatactcaaccaggggaaggctgaagatcaaccaaccaccaccaccaccaccaaacagccttcaagtaggatctgaatgatgtacaggaatcttcatagtttcctcttcttcaaaacaggaaatgggctggagctatttaacgtgaaagatttagagtagatgccaaaaagaacttctagatcaagagaagtgcctaaagaacagtggaaggagcacaggtcatgttcaggatctattttgagggaattagtttttcaattcaggaccctatgtcattcgtctgggaatggtttaaatgaaggtctgcctgcctgaacaccagggaatgggcaggatgacctggttggctcctttcagatgagacagattaggtccacaggggtcaaggggaggggaagggtggagaaagaagttaccccttgcagatagagactgtgaagattctggaggccttctaagttcctgatagtagtaatcccctcccggtccaggcggacagtctgcagttcatcaagagtgtgaaacctgggaaaagagtcagtaagggtggtgttagagcaccactcatgtggtctcttagcagggaggatgggagacggaggagggaaggggtttcaaggaggggtagttggctgagtcattttaatcagatgtgagaaacatcttgacatcttgaggtggtgtctagatcatgaaaccggcttgacttgcagactcgtatctctattgttagcactgggaagggtgagagagaggagtaagggccctctgggaaattgggggatggcagcttatggtttctggagagattcagaggcaagagaaaccttcctctggccagcttggatggtggaggcaggggtgggacagagatgagacactgcagaaagatccttcctcaccttccttttgagtcgttcatggagaaaaaagcacttgttccatccacccattcattcattccacaacattgctgagtgcctactagagacaaatgacagagtctctgcccaccactaataaagaagcagggcaggctgaccatggtggcttaccctgtactcccagcactttgggaggccgaggcaggaggatcgctcgagcccaggaggtcgaggctgcagtgtgccatgattatgccactgcacttcagcctgggtgacagagcaagaccctatgtcataaaaaaaaaaaaaaaagaggctgggcgaggtggctcactgtaatcccagcactttgggaggtcgaggtgggtggattgcctgaggtcaggagttcaagaccagcctggctaacatggtgaaaccccatctctactaaaaatacaaaaaaaattagccgggtgtggtggcgcacacctgtagtcccagctactcgggaggctgaggctggagaatcgcttcaactcaggaggcagacgttgcagtgagccgagatcacaccattgcactccagcctgcgcaacagagtgagactccgtctcaaaaaaaaaaaaaaaaaataggaagaaggccaaacatctatgacaagtggataacagaggcaagtacaggggaaaggaagaaggaggaggaagaagggaaagaaggaggaagaggaagaagaaagaaagaaagaaagaataaggccaaacatccctgacaagtggataacagaagcaagtacaggggacaaagggagtacataggctgtgcactaaattcacagtaggaggaatcagggaatgcttcctagaggaggtgacagatgagtaggcattagccatgaaggtggggggatatggggagaaggcatttcaagcagaaggaatagtacatgctaatacagcccttccgaaactccaatatgcccatgcagattctaattcagtagatcgggtggaggggctgagatgctccacttctaacaagccccctgtgatgccaatgctgctgtcctacccctgcaccccctcccatccacacatactctgagtagtaaggtactaaggtgtgagtacacagtgtgggaaattgtacacttgtggagagtggccagaaataaggctgaaaagcagaagtcaactcatgcttaggcattgggatttatttgggaggaagtttctatcagtgaatgcctgattagatttgttatttaaaaggatcactttggctactcaggaggctgaagtgggaggattgtttgaggagttcaagaccagtctggccaacagagcaagaccccatctctaaaaaagtaattaaaaatactttactttttgtttgttttagaaatagggtctcaccctgttgcccaggctggcatgcaatggcatgatcatagcttactgcagccacaggtacctgggttcaagtgatcctcctgtctcagccacctaggactacaggtgtgcaccaccatgctcagctagtttatttttattttttagagataggattctgtctctattgcccaggctggtctcaaactcctgggctcaagtgatcctcctgcctcagcctcccaaagtggtgggtgtgtaggagagaggtgaacacggccttatctaagacagttgagtgaggatggtgaaaaagaaatggaattattttgaagaagggaaaatcagctgggcattaccactgattgaatgtgtggagtaaggagagaaacaaagatcagttgacaaatcagtacacgtcagggacctggtcatcctgagtgtttcagccttctagcaccccttttctcccccatgcactcacatcttctctgacagttccccatcttcagggaaagtcaagttccgcttagtgataagggcttcagtgatgcagacgcccccttcctctggaccctgggctgacttccctgtgaaaagatgagtccaactgtgacacttcctcactcttggaggccttaccccgctgttttccaactgctctacccaccgtcccacctccctactcacctccagacatgatctaaaataaaaggctgctggtctgaggcgggagaggaacgaaaagagaggtcttggcggcccctaaggatggcagaactcaggatggcaggaggagagagaaactcagagacttaggagaggaggaaagggggttgattcagagaaaattgctggggtgaggtcgaagaaaacagtaaattgatgtgaagggtctggagtttgaggggtgtggaggggctttgctggcagcaagctggggtgttgtgggcaggaatggttgagaaaggagcagttcctaggaagccggagtcgttgctaagagactggacgccgagtggggaggtaaaggcgggctccgttggcccgg

SEQ ID NO: 835 - DNA, 776 bp, Homo sapiens
  misc_feature (709)..(709): n equals a,t,g, or c
  misc_feature (738)..(738): n equals a,t,g, or c
tacaacgtcgtgactgggaaaaccctggcgttacccaacttaatcgccttgcagcacatccccctttcgccagctggcgtaatagcgaagaggcccgcaccgatcgcccttcccaacagttgcgcagcctgaatggcgaatggcgcctgatgcggtattttctccttacgcatctgtgcggtatttcacaccgcatatggtgcactctcagtacaatctgctctgatgccgcatagttaagccagccccgacacccgccaacacccgctgacgcgccctgacgggcttgactgctcccggcatccgcttacagacaagctgtgaccgtctccgggagctgcatgtgtcagaggttttcaccgtcatcaccgaaacgcgcgagacgaaagggcctcgtgatacgcctatttttataggttaatgtcatgataataatggtttcttagacgtcaggtggcacttttcggggaaatgtgcgcggaacccctatttgtttatttttctaaatacattcaaatatgtatccgctcatgagacaataaccctgataaatgcttcaataatattgccaaaggaagagtatgagtattcaacatttccgtgtcgcccttattccctttattgcggcattgagcctgtctgtttttgctcacccagaaacgctggtgaaagtaaaagatgctgaagatcagttgggtgcacgagtggngtacatcgaactggatctcaacagcggtnagatcctcgagaggtttcgcccccgaagaacgtttttc

SEQ ID NO: 836 - DNA, 878 bp, Homo sapiens
  misc_feature (741)..(741): n equals a,t,g, or c
gaaaaccctggcgttacccaacttaatcgccttgcagcacatccccctttcgccagctggcgtaatagcgaagaggcccgcaccgatcgcccttcccaacagttgcgcagcctgaatggcgaatggcgcctgatgcggtattttctccttacgcatctgtgcggtatttcacaccgcatatggtgcactctcagtacaatctgctctgatgccgcatagttaagccagccccgacacccgccaacacccgctgacgcgccctgacgggcttgtctgctcccggcatccgcttacagacaagctgtgaccgtctccgggagctgcatgtgtcagaggttttcaccgtcatcaccgaaacgcgcgagacgaaagggcctcgtgatacgcctatttttataggttaatgtcatgataataatggtttcttagacgtcaggtggcacttttcggggaaatgtgcgcggaacccctatttgtttatttttctaaatacattcaaatatgtatccgctcatgagacaataaccctgataaatgcttcaataatattgaaaaaggaagagtatgagtattcaacatttccgtgtcgcccttattcccttttttgcggcattttgccttcctgtttttgctcacccagaaaacgctgtgaaaagtaaagatgctgaagatcagttgggtgcacgagtgggttacatcgaactggatctcaacagcggtaaaaaccttgagagttttcgnccccgagaacgtttttcaatgatgagcacttttaaagttctgctatgtggcgcggtattaatccctatttacgcccgggcagaagcactcggtcgccggatacactattctagaatgacttggttgagtactaacca

SEQ ID NO: 837 - DNA, 150 bp, Homo sapiens
cgtcgtgactgggaaaaccctggcgttacccaacttaatcgccttgcagcacatccccctttcgccagctggcgtaatagcgaagaggcccgcaccgatcgcccttcccaacagttgcgcagcctgaatggcgaatggcgcctgatgcgg

SEQ ID NO: 838 - DNA, 1299 bp, Homo sapiens
ttttttttttttttggcaaataaagagtaaaacaggctatttaaaacatccatttaaatgcaaattttgatatcccaagagaaaaatgttaatcatttaaatagacaggattatcgcccacccttaccacttccctcctctcccaagttttagaaaacgtagccttagcccacacaagtcaagtcagccaggagtccttacatcttaagaactcccactcagatgagagggctgaggcagatagagggggacttttccttcttttgaggaaggagatggaaaagagagaaaatagtctaacatatcctataagccaggcatggggcaatattataaatacaaacacacacacacacacacacacatgcatgcacacacacacacccacacttaatcatcacaactgtcttggaacggggaattatcatcctcatctacagacaaggaaactgaggcttagaaaggtgaagcagtttgccccactggtaggtgacccagttgggagtagaggcctccatagccctcccagtccatggtgacctgcggtcctgtccagactcacccagcatccccatgccaagcatgaacgcgtccatggtgtaaggcagtccccgggcccggcctcttgtcccaggtgggaacatgacttctttcggctgagctttcttacattctacctgttaaacagaaaggcgaacaaatgagatgcaaatgaattccacgtaaatgtcaaatgcagaacctgtctggttatgagctaagttatttttagccttgctccttacccactgtaaaaatagccatgccgagtaaatggcctgcaaaataaatacttaagaaaacacgccacttgtgcaaatcctgcttcggaaaaacctacaaggatgaaactgggttctggaggggtggcaaggacgtaagctgcagatatacacacagattgaagctcaggctgacgctcgtgcagaaagcatgacagataaggaggcagacaatggctgttggatgtgtctgtgaataataacaacaatagcaataataataatccctcaggatttttcagccctttacacatttacaaatgcccctgacattctctcaggccagtgactcttcatgccaggccatctgattcaaactcttattaaacagacagaccacttagccttagctccagttcacagatgagaaaacagagcatcagaagttttgtgttggctgggcgtgggggatcatgtttgtaatcccagcactgtgggaggtggaggcaggtgaatcagcttgagcccaggcgtttca

SEQ ID NO: 839 - DNA, 330 bp, Homo sapiens
tttttaaaaacattttctcatttattctcacttgtttcttcttccagggataagttttagaaacatctggccaatttaaaaaaattacaataggatttctctttgaaactctgttaagcctaaaaaattcatatgaggagaattaacatcatggccatttttaatattctcctggcatctttttctatttcataaagttcctcaaaatagttttacctgcccttgttatttcctcagacaagtagatacaattctttgtcagaccacaagatgttttataaatttaaaattaagccagaagtgatttaaacagcagcaaatctgaaaata

SEQ ID NO: 840 - DNA, 3328 bp, Homo sapiens
ttgttttgtctcaggttttttttttcttttttttttttgagagggtgtctcgctctgttgacaggctggagtacagtagcacgatctcaggccactgcaacctctaccttctgggttcaagagattctcctgcctcagcctcccaagtagctgggactataggcgcatgccaccacgcccagctaatttttgtatttttagtagagacagggtttcaccattgttggccaagctggtctcgatctctttgaccttgtgatccacccaccttggcctcccaaagtcctgggattacaggcgtgagccactgtgcccagcctggctcaggtttttcaatacagtcttgaccttggcattcagtatcctcacagcatggttctaattaactttctagctctatttcccttttcctgctccctctctctacaactagtctttctctgattgccccgccctcaacccatctaaactagaccccagggaagcaccttggtccccttcctctctcccactcaccatccaaccaatcaccagagcctgtacattctatattttcaacatcgattcaattgtctacttctttctagcctgccctctctgactgggactccttgagccagcctgatcaccccaatccatccctcacactgtgcccatctttctgaagtaggaatctgatcacaccaccctgctaaaaacactctggttctccccacggcatgtggtgcccttgtatagctggcaaagccttgcatggcacggccccagcctgtgcttcaactcaattgcccgactctctccagctctgctgagccacctaagtcacagatggtttctcctctcatctctgctctcttccatgtgccatttctgtggcttggaatgttcttccctcattctctttctggccctttcccgtcacaccttagacgtgcatcttcctctcgaaaacctctagtgaagcctcccagggccaggcagtaccctcctctggcttcttctggatacagaggaagaatctgagcatcgattctccatctcagcaggcctctgtgtgcctgctgactccgactagaccagagatccgtaaggacagggatcgagttttttttcttttaattcactgcctcaaaaatcctctgtgcattacctattcatcctcttctctcccttaacctgaaccagtgatcttactgtctccatcattgtttttttcttttcttttcttttcttttttttttttgaggtggagtctggctcttcacccaggctggagtgcagtgatgcgatctcgactcactgcaacctccatctcctgggttcaagcgattctcctgcctcagcctccccagtagctgggattacaggcatgcgctaccatccccaactaatttttgcctccataattttgccttttctagaatgtcatacaggtggaattactcagtatgctgcctttttcagattggcttctttcacttagtaatatgtttgttttttgagacagggtcttgctctgtcgcccaggctagagtgtggtggtgcgatcttagctcactgaaacctccacctcccaggttcaagtgactctcctgcctcagcctcccgagtagctgggactacaggcacatgccaccatacccggctaatttgtggatttttagtacagacggggtttcatcatgttggccagggtgttgttgaattcctgacctcaagtgatccacctgcctcagcctcccaaagtgttgcgattacaggtgtgagccactgcgccaagcctcatttagtaatatgcatttaaactttctccatgtctttaatggcttgatagctcatttatttttatcatggaatatttcattgtctggatggaccacagtttatttctccattcacctactgaaggacatctcggttgcttctaagttttggcaattatgaataaagctgctataaccatcaagtgcaggtttttgtgtggacctattatcaactaattcgggtaaatctcaaggagtgcaattgctggatcacacagtaagagtgtgtttagttttaagtggctgtgccattttgcattcccaccagcaatgaatgagagtttctgttgctccacattctcactaccattcggtgttgtcagtgttttgcattttggccattctagtaggtgtttacatggtatctagtcatttgaatgggcatatgatgtggaacatctttttttttttaattttattattattatactttaagttttagggtacatgtgcacaacgtgcaggtttgttacatatgtatacatgtgccatgttggtgtgctgcacccattaactagtcatttagcattaggtatatctcctaatgctattggaacatcttttcatgtgtttatttgccatctgtatatcttccctgatgagttggggatgcattctttccatctcagagtccccagaaactaacatagcagttggtacagagttggtgctcaacaaacatcagcttaggaactatgtcctatgtttttttgtttttttttttttttaaaaaggaatgtgagctgttcccaaaacgtatgtccttcccccatgcctctaccctgcccttccacaaactttctgatcttcagcacacactacccaaccatcaaggctgagacttcccgtggccagcagtgtctcatgctggcttcaagccccacagcactgcttttttcaacttctcttgtggtttagactgtctttagcccagcaagagaattcattgtcttatcccccattaaactgtacctacactctttgaggaaaagggtccatcttacttaaaatattttaaaaattcacatgtgataaaactgatgtgtatgtgtatgagagagagagaaagagagaacagttctatgaggcttaatgtatacatgtggctgtgcagcccactgccccatgtcaccattttcaattctgtcattacccctgggacaatgtcttgtcaatatacacttgaggctgggcggggtggttcctgcctgtaatcccacctgtaatcaggagttcaagaccagcctggccaacacagcaaaaccccgtctctactaaaaatacaaaaatttgctgggcgtggtggcacgggcctgtaatcccagctactcaggtggctgaggcaggacaatcgcttgaaccggggaggtggaggttgcagtgagccaagatcgtgccactgcactccagcctaggcaacagagcgagactctgtctcaaaaatacatacatacacacacacatacacacacacgcgcaagagacacagtgagtagaaacaccga

SEQ ID NO: 841 - DNA, 3051 bp, Homo sapiens
tttttttttttgagagggtgtctcgctctgttgacaggctggagtacagtagcacgatctcaggccactgcaacctctaccttctgggttcaagagattctcctgcctcagcctcccaagtagctgggactataggcgcatgccaccacgcccagctaatttttgtatttttagtagagacagggtttcaccattgttggccaagctggtctcgatctctttgaccttgtgatccacccaccttggcctcccaaagtcctgggattacaggcgtgagccactgtgcccagcctcggctcaggtttttcaatacagtcttgaccttggcattcagtatcctcacagcatggttctaattaactttctagctctatttcccttttcctgctccctctctctacaactagtctttctctgattgccccgccctcaacccatctaaactagaccccagggaagcaccttggtccccttcctctctcccactcaccatccaaccaatcaccagagcctgtacattctatattttcaacatcgattcaattgtctacttctttctagcctgccctctctgactgggactccttgagccagcctgatcaccccaatccatccctcacactgtgcccatctttctgaagtaggaatctgatcacaccaccctgctaaaaacactctggttctccccacggcatgtggtgcccttgtatagctggcaaagccttgcatggcacggccccagcctgtgcttcaactcaattgcccgactctctccagctctgctgagccacctaagtcacagatggtttctcctctcatctctgctctcttccatgtgccatttctgtggcttggaatgttcttccctcattctctttctggccctttcccgtcacaccttagacgtgcatcttcctctcgaaaacctctagtgaagcctcccagggccaggcagtaccctcctctggcttcttctggatacagaggaagaatctgagcatcgattctccatctcagcaggcctctgtgtgcctgctgactccgactagaccagagatccgtaaggacagggatcgagttttttttcttttaattcactgcctcaaaaatcctctgtgcattacctattcatcctcttctctcccttaacctgaaccagtgatcttactgtctccatcattgtttttttcttttcttttcttttcttttttttttttgaggtggagtctggctcttcacccaggctggagtgcagtgatgcgatctcgactcactgcaacctccatctcctgggttcaagcgattctcctgcctcagcctccccagtagctgggattacaggcatgcgctaccatccccaactaatttttgcctccataattttgccttttctagaatgtcatacaggtggaattactcagtatgctgcctttttcagattggcttctttcacttagtaatatgtttgttttttgagacagggtcttgctctgtcgcccaggctagagtgtggtggtgcgatcttagctcactgaaacctccacctcccaggttcaagtgactctcctgcctcagcctcccgagtagctgggactacaggcacgtgccaccatacccggctaatttgtggatttttagtacagacggggtttcgtcatgttggccagggtgttgttgaattcctgacctcaagtgatccacctgcctcagcctcccaaagtgttgcgattacaggtgtgagccactgcgccaagcctcatttagtaatatgcatttaaactttctccatgtctttaatggcttgatagctcatttatttttatcatggaatatttcattgtctggatggaccacagtttatttctccattcacctactgaaggacatctcggttgcttctaagttttggcaattatgaataaagctgctataaccatcaagtgcaggtttttgtgtggacctattatcaactaattcgggtaaatctcaaggagtgcaattgctggatcacacagtaagagtgtgtttagttttaagtggctgtgccattttgcattcccaccagcaatgaatgagagtttctgttgctccacattctcactaccattcggtgttgtcagtgttttgcattttggccattctagtaggtgtttacatggtatctagtcatttgaatgggcatatgatgtggaacatctttttttttttaattttattattattatactttaagttttagggtacatgtgcacaacgtgcaggtttgttacatatgtatacatgtgccatgttggtgtgctgcacccattaactagtcatttagcattaggtatatctcctaatgctattggaacatcttttcatgtgtttatttgccatctgtatatcttccctgatgagttggggatgcattctttccatctcagagtccccagaaactaacatagcagttggtacagagttggtgctcaacaaacatcagcttaggaactatgtcctatgtttttttgtttttttttttttttaaaaaggaatgtgagctgttcccaaaacgtatgtccttcccccatgcctctaccctgcccttccacaaactttctgatcttcagcacacactacccaaccatcaaggctgagacttcccgtggccagcagtgtctcatgctggcttcaagccccacagcactgcttttttcaacttctcttgtggtttagactgtctttagcccagcaagagaattcattgtcttatcccccattaaactgtacctacactctttgaggaaaagggtccatcttacttaaaatattttaaaaattcacatgtgataaaactgatgtgtatgtgtatgagagagagagaaagagagaacagttctatgaggcttaatgtatacatgtggccgtgcagcccactgccccatgtcaccattttcaattctgtcattacccctgggacaatgtcttgtcaatatacacttgaggctgggcggggtggttcctgcctgtaatcccacctgtaatcaggagttcaagaccagcctggccaac

SEQ ID NO: 842 - DNA, 3029 bp, Homo sapiens
  misc_feature (1)..(1): n equals a,t,g, or c
  misc_feature (4)..(4): n equals a,t,g, or c
  misc_feature (150)..(150): n equals a,t,g, or c
ntancccattgtgcccagcctggctcaggtttttcaatacagtcttgaccttggcattcagtatcctcacagcatggttctaattaactttctagctctatttcccttttcctgctccctctctctacaactagtctttctctgattgcnccgccctcaacccatctaaactagaccccagggaagcaccttggtccccttcctctctcccactcaccatccaaccaatcaccagagcctgtacattctatattttcaacatcgattcaattgtctacttctttctagcctgccctctctgactgggactccttgagccagcctgatcaccccaatccatccctcacactgtgcccatctttctgaagtaggaatctgatcacaccaccctgctaaaaacactctggttctccccacggcatgtggtgcccttgtatagctggcaaagccttgcatggcacggccccagcctgtgcttcaactcaattgcccgactctctccagctctgctgagccacctaagtcacagatggtttctcctctcatctctgctctcttccatgtgccatttctgtggcttggaatgttcttccctcattctctttctggccctttcccgtcacaccttagacgtgcatcttcctctcgaaaacctctagtgaagcctcccagggccaggcagtaccctcctctggcttcttctggatacagaggaagaatctgagcatcgattctccatctcagcaggcctctgtgtgcctgctgactccgactagaccagagatccgtaaggacagggatcgagttttttttcttttaattcactgcctcaaaaatcctctgtgcattacctattcatcctcttctctcccttaacctgaaccagtgatcttactgtctccatcattgtttttttcttttcttttcttttcttttttttttttgaggtggagtctggctcttcacccaggctggagtgcagtgatgcgatctcgactcactgcaacctccatctcctgggttcaagcgattctcctgcctcagcctccccagtagctgggattacaggcatgcgctaccatccccaactaatttttgcctccataattttgccttttctagaatgtcatacaggtggaattactcagtatgctgcctttttcagattggcttctttcacttagtaatatgtttgttttttgagacagggtcttgctctgtcgcccaggctagagtgtggtggtgcgatcttagctcactgaaacctccacctcccaggttcaagtgactctcctgcctcagcctcccgagtagctgggactacaggcacatgccaccatacccggctaatttgtggatttttagtacagacggggtttcatcatgttggccagggtgttgttgaattcctgacctcaagtgatccacctgcctcagcctcccaaagtgttgcgattacaggtgtgagccactgcgccaagcctcatttagtaatatgcatttaaactttctccatgtctttaatggcttgatagctcatttatttttatcatggaatatttcattgtctggatggaccacagtttatttctccattcacctactgaaggacatctcggttgcttctaagttttggcaattatgaataaagctgctataaccatcaagtgcaggtttttgtgtggacctattatcaactaattcgggtaaatctcaaggagtgcaattgctggatcacacagtaagagtgtgtttagttttaagtggctgtgccattttgcattcccaccagcaatgaatgagagtttctgttgctccacattctcactaccattcggtgttgtcagtgttttgcattttggccattctagtaggtgtttacatggtatctagtcatttgaatgggcatatgatgtggaacatctttttttttttaattttattattattatactttaagttttagggtacatgtgcacaacgtgcaggtttgttacatatgtatacatgtgccatgttggtgtgctgcacccattaactagtcatttagcattaggtatatctcctaatgctattggaacatcttttcatgtgtttatttgccatctgtatatcttccctgatgagttggggatgcattctttccatctcagagtccccagaaactaacatagcagttggtacagagttggtgctcaacaaacatcagcttaggaactatgtcctatgtttttttgtttttttttttttttaaaaaggaatgtgagctgttcccaaaacgtatgtccttcccccatgcctctaccctgcccttccacaaactttctgatcttcagcacacactacccaaccatcaaggctgagacttcccgtggccagcagtgtctcatgctggcttcaagccccacagcactgcttttttcaacttctcttgtggtttagactgtctttagcccagcaagagaattcattgtcttatcccccattaaactgtacctacactctttgaggaaaagggtccatcttacttaaaatattttaaaaattcacatgtgataaaactgatgtgtatgtgtatgagagagagagaaagagagaacagttctatgaggcttaatgtatacatgtggctgtgcagcccactgccccatgtcaccattttcaattctgtcattacccctgggacaatgtcttgtcaatatacacttgaggctgggcggggtggttcctgcctgtaatcccacctgtaatcaggagttcaagaccagcctggccaacacagcaaaaccccgtctctactaaaaatacaaaaatttgctgggcgtggtggcacgggcctgtaatcccagctactcaggtggctgaggcaggacaatcgcttgaaccggggaggtggaggttgcagtgagccaagatcgtgccactgcactccagcctaggcaacagagcgagactctgtctcaaaaatacatacatacacacacacatacacacacacgcgcaagagacacagtgagtagaaacaccga

SEQ ID NO: 843 - DNA, 224 bp, Homo sapiens
gaccaacatggtgaaaccctgtctctactaaaaacacaaaatttagctgggtgtggtggtgcgcacctgtaatcccagctactcaggaagctgaggcaggagaatcacttgaacctggtaggtggaggttgcagtgagctgagatcatgccactgcactccagcctgggtgacagagcgagactctctctccaaaaaaaaaaaaaaaaacctagaccagatgca

SEQ ID NO: 844 - DNA, 468 bp, Homo sapiens
tcagcattaaaatttggggaaaaaaatgtttgaagatcaatgaaaaatagcactggactctatatttacttatataagattttttttttaaatcttgatgaaaatttttattaggctagaattgcagagctgcaagagaattctgagatcaacaggtctttttccttcatttaccagctgagaaacttggggtcataggagattaagattgtttatcttaccagttgaattcaatactttcagaaataattgttagaattcagtgaaagttattctcttaaaagtacactgcttttcagctcctatcaagtgtttccctatgcttccacaatcctgattatcaatttgggtatgggccactctgggaaaggctgtcaaatgtttattctagaatccagcaactcccagatgtccatctccatctcaggttctggtcaaagtctgatgtagcaaagaaacagagtaaca

SEQ ID NO: 845 - DNA, 222 bp, Homo sapiens
ccaacatggtgaaaccctgtctctactagaaacacaaaatttagctgggtgtggtggtgcgcacctgtaatcccagctactcaggaagctgaggcaggagaatcacttgaacctggtaggtggaggttgcagtgagctgagatcatgccactgcactccagcctgggtgacagagcgagactctctctccaaaaaaaaaaaaaaaaacctagaccagatgca

SEQ ID NO: 846 - DNA, 468 bp, Homo sapiens; identical to SEQ ID NO: 844

SEQ ID NO: 847 - DNA, 224 bp, Homo sapiens; identical to SEQ ID NO: 843

SEQ ID NO: 848 - DNA, 1854 bp, Homo sapiens
ttttttttttgagactataaacatatatatacacgtagtattttctatggttgccaattcttatgctagatgttagcattacaaattcgtataaaatctgtgtccgccttcatagtccaacaacaaacgtttgctgagtgtagaactcccaggagttctctcatggacacaacagccacactcaccctcacattagctggcagaggccctttataccagtgatacgcttgggccaagggcccctgggttgaaaatcattaggtagacaccatccagtgccctgtctcatgtgctgaacagggctagtaatgccgactttcactttgggaggccaagtcgggtggatcacttgaggccaggaggtcaggaccagctagccaacatggtaaaaccctgtctctactaaaaatacaaaaattagctgggcatggtggcatatgcctatagtgccagctactcaggaggctgaggcatgagaatcacttgtacccaggaggccgaggtttcagtgagccaagatcatgccactacactccagcctgggtgacagagtgatatagatctcaaaaaaaaaaaaaaaaagtgtcaacctttacttctattttatcaagttcttgttccagcctgtccttttcaaaagataccctccttggtaaagattccaaagttttgggttttctttaaatgtatgcatccaatgtctttttcatttcattaaggtcaaataaatatttgtcctgggtttccaataaggtatttgagattttcctgtgccataatgactgtatttggtacaggcaaggcaatatactaaggtctctctacagatcttgaaaatcagatcagccttggaggatgaaattagtaacaactaatacaccctggaggacaccagccctttggaaggcattcattggaagagactagaaaagcagttgaggttgggagtttctcatttcaggcaaagtgacaagggagtggtatcagaaaatacgatcttaactaagaaagctagaacctatatcactctagaagactgttcacaaacggtagcagggcccatgtgcagcttggaaagaggaagcttaatgtgcaaaaatttaatatccctgcaactctctggaaattggcaagatggtccctcagaagagcagatctgtgtggtgagtgagatatcacagctccatgaggtgaacaccaaaccttccaatcatcagttgtctcccatgtacttatggagaatggtagacaaaactcactgaactgcttcatttgtacattgatctcttgtgaccttgctttgtgggagttagtcccagagaatctttataaactggcaagattttctgacctaaagaggtaggatctgtggaaaatgatgacctaccaaagtacaaatctagagaactgaggtttggagaacatgaaaaccatggtcaaacacgtgaaggcctgccactgggaagaggaattcaactagcaatacacaggcccaactaatatgtaagaaagacactacaaagtagtagttaagaacacaggctctggagccaaacgacttggctctaacacttactggctccatgaccttgaacaacttaggttccatgtgccttaatttctccatctgttaaataaagtgattgtgaagatttaatgagataatccaaataaatgcttagtacaatgtatggaacacagcaagttctcaagagactagccattacatcattattatccaaagaagaaacagaccaccctgtaagatttggaagggagctcccccaggactcctcccaccccctgccaggggtacagagagactagtttattgagggccaaacacaaaacttg

SEQ ID NO: 849 - DNA, 2128 bp, Homo sapiens
tctacctccgggctgaaacgtcaccatgcctccccacagacagacggatggacagatgggcctccctgcacctgctctgtgggtgtgggggctcctgctcagcagcagtttccagacccttctccctgctttccccaagccacccgccttgaatctggggtgctctaccagacccatcccctcatttctaaagatttgagccactagtcgtgtccctctccctcagaaatgccttggtgacacttggctgctttcaactcttccacccatctgcctcttggtctcatctttaccttctgctaaaggtcctgacccccacccccgccacgccatggggcaccccatggtggtgcgtccttgggagcagctctgtccctttccccgtggcctttgccccgcctcctatgacttcgattcccacctgtccccgacccctgggaccactgaccgggcccgatcaccctgtcactgccctgtcatctgcttaccccacacggtgctctgctgacccaggtcttgctgtctcccaacagccccacgaggcttcccgtcgctcctggacactgcaggctgagcccgctgccccgccgcctccatgaggaaggcttttcctctgtgagccccaggccaccctttccctcctttaagtaattacttaagtcccttgccagggccctcccagtaccctttctaaagacacccctgccccagcatgctgcaggctcctgctccactttcctctcaggccctcgtcgctgtggtgctgcctttgttttctgtctctgccacggcagggggtcagctccttggaggtggggcttctgcccttgctgtaccactgcctggcacacagtaggtgctcaataaagacttgcagggtgagctgcctgaagaatagtcaccagaggccagaaatgtctagagctctgccggtagggtgactggccgaggagcctggcctgcatgtgtgcgtgtgtgtgtgtgtgtgtgtgtgtgtgagtcagggtttatatgcaggtgtctacaggagacatgctgggttctgtgctgggtgtgaggaatatgggagcagaaccccagggaggtggcagagacttgggggccaaagggctggggtgcaggggggcaacagccaggtgccactggccaccccagccgcagggagccctgcccaccctccaggtgcctggatgtccaacctcactgctattcccacctcaagccaggcctggagatggaggccccatgactcagccagggccggtttgcagctgcggctgacccagacgggcgggcagcccccagcccccgggcctgcacccaggacagggccgccctccctccctcccccgcttctggctcctaggacaggattctctgaattcagctcccctgaggctggggccaggttggaggccaggcctgggggctctgggctggggtcccagataggggctgggcggccaggcttggaatctggaatccagccccattcctggcatctgcaggagcctcgtggggagggagacttgggatggacttcaaccagccagggctggattcttgccccggaacctgcattcctggggcagccaagggatccttcccacttctgggcccagcttggccctgcctggcattcgaggcccatctggggcttgggggtgtctccccaactctcagacataaggacacccttccaagcttgttccttcacctggcggggccctgagccccacacccctcccctgtcctttctccatccgacatcaagcgcctccctgcctctgctcgcacagtctctgagatggggaactcagcacctcacaggtgggcccagctctggtgctgtctgtgttgggggagctggggcagcccccaaaagaccttggagacagaccctcagaggcaggagcagaggctggcagtggatgctgtgcctggaggccttgagggcgaggtgtgatgatgaggcccaggctgcagggctctttctggctctccagctccggagaacaagggatttcctcctgctctgcccaccctccccagccagtgcatgctcagcctcagcaccgcacctgggcgccctccatgatctgccccacctggacacatggctcgaggg

SEQ ID NO: 850 - DNA, 2129 bp, Homo sapiens
tctacctccgggctgaaacgtcaccatgcctccccacagacagacggatggacagatgggcctccctgcacctgctctgtgggtgtgggggctcctgctcagcagcagtttccagacccttctccctgctttccccaagccacccgccttgaatctggggtgctctaccagacccatcccctcatttctaaagatttgagccactagtcgtgtccctctccctcagaaatgccttggtgacacttggctgctttcaactcttccacccatctgcctcttggtctcatctttaccttctgctaaaggtcctgacccccacccccgccacgccatggggcaccccatggtggtgcgtccttgggagcagctctgtccctttccccgtggcctttgccccgcctcctatgacttcgattcccacctgtccccgacccctgggaccactgaccggggccgaatcacctgtcactgccctgtcatctgcttaccccacacggtgctctgctgacccaggtcttgctgtctcccaacagccccacgaggcttcccgtcgctcctggacaatgcagggtgagcccgatgccccgccgcctccatgaggaaggcttttcctctgtgagccccaggccaccctttccctcctttaagtaattacttaagtcccttgccagggccctcccagtaccctttctaaagacacccctgccccagcatgctgcaggctcctgctccactttcctctcaggccctcgtcgctgtggtgctgcctttgttttctgtctctgccacggcagggggtcagctccttggaggtggggcttctgcccttgctgtaccactgcctggcacacagtaggtgctcaataaagacttgcagggtgagctgcctgaagaatagtcaccagaggccagaaatgtctagagctctgccggtagggtgactggccgaggagcctggcctgcatgtgtgcgtgtgtgtgtgtgtgtgtgtgtgtgtgtgagtcagggtttatatgcaggtgtctacaggagacatgctgggttctgtgctgggtgtgaggaatatgggagcagaaccccagggaggtggcagacacttgggggccaaagggctggggtgcaggggggcaacagccaggtgccactggccaccccagccgcagggagccctgcccaccttccaggtgcctggatgtccaacctcactgctattcccacctcaagcaaggctggaaaatgaaggcccactaatccgccaggggcgggttggcacttccggttaaccaaaacgggcgggcagccccagccccctggcctgcacccaagagaagggcggcctccctccctcccccgcttctggctcctaggacaggattctctgaattcagctcccctgaggctggggccaggttggaggccaggcctgggggctctgggctggggtcccagataggggctgggcggccaggcttggaatctggaatccagccccattcctggcatctgcaggagcctcgtggggagggagacttgggatggacttcaaccagccagggctggattcttgccccggaacctgcattcctggggcagccaagggatccttcccacttctgggcccagcttggccctgcctggcattcgaagcccatctggggcttgggggtgtctccccaactctcatacataacgacacccttccaagcttgttccttcacctggcggggcccttagccccacacccctcccctgtcctttctccatccgacatcaagcgcctccctgcctctgctcgcacagtctctgagatggggaactcagcacctcacaggtgggcccagctctggtgctgtctgtgttgggggagctggggcagcccccaaaagaccttggagacagaccctcagaggcaggagcagaggctggcagtggatgctgtgcctggaggccttgagggcgaggtgtgatgatgaggcccaggctgcagggctctttctggctctccagctccggagaacaagggatttcctcctgctctgcccaccctccccagccagtgcatgctcagcctcagcaccgcacctgggcgccctccatgatctgccccacctggacacatggctcgaggg

SEQ ID NO: 851 - DNA, 2132 bp, Homo sapiens
tctacctccggcctgaaacgtcaccatgcctccccacagacagacggatggacagatgggcctccctgcacctgctctgtgggtgtgggggctcctgctcagcagcagtttccagacccttctccctgctttccccaagccacccgccttgaatctggggtgctctaccagacccatcccctcatttctaaagatttgagccactagtcgtgtccctctccctcagaaatgccttggtgacacttggctgctttcaactcttccacccatctgcctcttggtctcatctttaccttctgctaaaggtcctgacccccacccccgccacgccacggggcaccccatggtggtgcgtccttgggagcagctctgtccctttccccgtggcctttgccccgcctcctatgacttcgattcccacctgtccccgacccctgggaccactgaccgggcccgatcaccctgtcactgccctgtcatctgcttaccccacacggtgctctgctgacccaggtcttgctgtctcccaacagccccacgaggcttcccgtcgctcctggacactgcaggctgagcccgctgccccgccgcctccatgaggaaggcttttcctctgtgagccccaggccaccctttccctcctttaagtaattacttaagtcccttgccagggccctcccagtaccctttctaaagacacccctgccccagcatgctgcaggctcctgctccactttcctctcaggccctcgtcgctgtggtgctgcctttgttttctgtctctgccacggcagggggtcagctccttggaggtggggcttctgcccttgctgtaccactgcctggcacacagtaggtgctcaataaagacttgcagggtgagctgcctgaagaatagtcaccagaggccagaaatgtctagagctctgccggtagggtgactggccgaggagcctggcctgcatgtgtgcgtgtgtgtgtgtgtgtgtgtgtgtgtgtgtgagtcagggtttatatgcaggtgtctacaggagacatgctgggttctgtgctgggtgtgaggaatatgggagcagaaccccagggaggtggcagagacttgggggccaaagggctggggtgcaggggggcaacagccaggtgccactggccaccccagccgcagggagccctgcccaccctccaggtgcctggatgtccaacctcactgctattcccacctcaagccaggcctggagatggaggccccatgactcagccagggccggtttgcagctgcggctgacccagacgggcgggcagcccccagcccccgggcctgcacccaggacagggccgccctccctccctcccccgcttctggctcctaggacaggattctctgaattcagctcccctgaggctggggccaggttggaggccaggcctgggggccctgggctggggtcccagataggggctgggcggccaggcttggaatctggaatccagccccattcctggcatctgcaggagcctcgtggggagggagacttgggatggacttcaaccagccagggctggattcttgccccggaacctgcattcctggggcagccaagggatccttcccacttctgggcccagcttggccctgcctggcattcgaggcccatctggggcttgggggtgtctccccaactctcagacataaggacacccttccaagcttgttccttcacctggcggggccctgagccccacacccctcccctgtcctttctccatccgacatcaagcgcctccctgcctctgctcgcacagtctctgagatggggaactcagcacctcacaggtgggcccagctctggtgctgtctgtgttgggggagctggggcagcccccaaaagaccttggagacagaccctcagaggcaggagcagaggctggcagtggatgctgtgcctggaggccttgagggcgaggtgtgatgatgaggcccaggctgcagggctctttctggctctccagctccggagaacaagggatttcctcctgctctgcccaccctccccagccagtgcatgctcagcctcagcaccgcacctgggcgccctccatgatctgccccacctggacacatggctcgaggg

SEQ ID NO: 852 - DNA, 290 bp, Homo sapiens
gatgtgtgtttgtgtgtgtgtgtggtgtgtgtatgtgtgtggtgtgtgtatgtgtgtggtgtatgtgtgtgtgtggtgtatgtgtgtgtttgtgtgtgtgtggtgtgtgtatgtgtatttctttgaatgagaaattggctcccatgattatggagctgacaactcccaaggtctgcaggcagcaagctggaggcccaggagggccggtggtgtggctgcagccggtgtctgaaggcctgagaaccaggagggcgggtggtgcagctgcagtgtgaaagccggcaggctcg

SEQ ID NO: 853 - DNA, 96 bp, Homo sapiens
ccaacatggtgaaaccccgtctctactaaaaatacaaaaattagccgggcatggcggcacgtgcctgtaatcccagctactcaggaggctgaggca

SEQ ID NO: 854 - DNA, 7881 bp, Homo sapiens
ccacaccaggagtgtccagtccttgggccttggtcagcctggagcagttgctcggccccctgtggtgggggcactatggagcgacatcggacttgtgaggggggtcctggggtggcaccatgccaggcccaggacacagagcaacggcaggagtgtaacctgcagccctgccctggtaagtgccctgggcggcaggtgactgactccctccattgctgctgagcccaggccctgccccagctgtggggggtaggtgtggggagaggaggtcggacccagggcagctccctccctgggactggagatgctgggtccctcccatctccctacctgtgtgctccccacagagtgcccccctggccaggtgcttagtgcctgtgccacctcatgcccgtgcctctgctggcatctgcagcctggtgccatctgtgtgcaggagccctgccagcctggctgtggctgccctggagggcaggtgggtacggggtgctgtgtcctgactccctgtgggggaagccggcaggtggggagggaagaggcggtggtctgagtgtcactgagcctgccctgctgcagctgctgcacaatggcacgtgtgtgcctcccactgcctgcccctgcacccagcattctctgccctggggcctcaccctgaccctggaagagcaggcccaggagctgcccccagggactgtgctcacccggaactgcacccgctggtgagggcctggccctggggtggggagcagggatgaggaagggtagggaggaggacatgggaggcatctgagtgtgcttctgtcttctcagtgtctgccacggtggagccttcagctgctccctcgttgactgtcagggtgagatgtggctgtccatgccctgctgcacctccaaagtcaaggcccgggactggcactgaggaggagagacgggccctgctcacagactagacagagcttcagaaagccctcccctgtctgtccacactgacctctctctaactggagacccagcaccccctgccgagggctccctgggcactcagtgtggtctgccccacttgtgggggcattccctagcacacagtatacacagagccagggctgtgatgccaggaagtggaaggttctttccctgccagtgaggaaactgaggtctggaggggtgagcggaaatgaggggcctggcctggcagcccccgggctgatagcatttgccctgtggggtgcagtgttacccccatctgatcaagaccaagggcccacccaccgtgttcccagctctgccacgctgggctctgtgaatgcagacatgcagcatggccagcctccgggcagaccacccacccccagaacaggcagagacagggcacagtctctaggtctctgacaggcaggtagaaccccagagggtgagacatcagtgctgagaatagaggccgagtggacaggattggtcagggagccttttctggaggaggtgagacctggcctgggtccagctagtgtttgggtgggtggataagaaagatcaggaggtgtggttggaggctgctgtggctgagaaggcaagatggggacgtgtgggtgctcagcttgggaggggaggaatcgaggctggatccagggctgacctgaaagctgggttggatggtcttccctggcagagtgccccctggggaaacgtggcagcaggtggccccgggggagctggggctctgcgagcagacgtgcctggagatgaacgccacaaagacccagagtaactgcagttcagctcgagcctcgggctgcgtgtgccagcccgggcacttccgcagccaggcaggcccctgcgtccccgaagaccactgcgagtgctggcaccttgggcgtccccacctggtgagacaccgaaccccctctgctaccactcacccattcctgaccccaagcctccccatctgtctgtaactccactggctcctccccctactccaggccctgcagcagccggcagggctccgctctccccctgggacagtctctggccccaacagttcatctccttcctgggtctcttgttgcctgactccatccaagcccattgccccggctaggcactcacaggctgggcttggggatcagggatactattatagaaaagtctgcaagttggagccgggcacggtggctcatgcctgtaatcccagcactttgggaggctgaggtaggcggatcatgaggtcgagagatcaagaccatcctggccaacatggtgaaaccccatctctactaaaaatacaaacattagctgagagtgctggtgcgtgcctgtagtcccagctactcgggaggctgaggcgggagaatcacttgaactggggaggtggaggttgcagtgagccgagattgtgccactgcactccagcctggcgacagagtgagactccgtctcaaaaaacaaaacaaaacaatacaaaacaaaacaaaacaaaacaaaacaaatctgcaagttgggagagaccaagaggaggctctcccctactctccccagcctggatctgaatggcaggaggcctgtgagagctgcctctgcctcagtgggaggcctgtctgcacccagcactgctccccactcacctgtgctcaggtacgccctgcatccctgctactctccggggtggttccccccttacctgggctccggtaccccctgcagccctaccaccctccctggttcctcgggctccttcctgggaccctcctccgaggttggtcttagggtctctgagtggggagggcgggccgggctccaggtgtcaagaccaccttgggactctctccctctgcagggcgaggagatggtgctggagccagggagctgctgtccctcttgccgcagggaggctccgggtatggagggaacctgggtgcattgtggggtgcctctccctggtctagacccttctcccctgccaccccacacctggcctttgcagcctggcagctgcctgactcccccaggccaacccaccatggggatttgaggagtgaagaccccagcacatatcatagcgcctggtcacctcgccccacacgcttccctcagacccaggccctgcccctcttcccacagtcccctcagtcccctcctcctcctgtgctctgtccccccccccacagtctcctcagtcatcccctcctcctgtgtcccctccacagtcccctcagtcatcccctcctcctcctgtgctctgtcccccccacagtcccctctgccatctcctcctcctgtgtcctctacagtccccttagtcccctcctcctcctgtgtccccctccacagtccctcagtcacctcctcctgtgccttcccgcacagtcccctcagtcacctcctcctctgtcccccccacagtcccctcagtcccctcctcctcctgtgctgtcccccacagtcccctccatcatcccctccacctgtgtcccctccacagtcccctcagtcccctccacctcctgtgtcctcccacagtcccctcagtcccctcctcctgtgtcctcccacagtctcctcagtcatcccctcctcctgtgtcccctcagtcatcccctcctcctgtgtcccctccacagtccccgcagtcatcccctcctcctgtgtcctcctccacagtctcctcagtcccctcctcctgtgtcccccccacagtcccctcagtcacctcctcctcctgtgccctcccccacagtcccctccatcatcccctcctcctgtgtcccccccacagtcccctcagtcacctcctcctctgtccccccgcacagtcccctcagtcacctcctcctcctgtgccttcccgcacagtcccctcagtcacctcctcctctgtccccccacagtcccctcagtcccctcctcctcctgtgctgtcccccacagtcccctccatcatcccctccacctgtgtcccctccacagtcccctcagtcccctccacctcctatgtcctcccacagtcccctcagtcccctcctcctgtgtcctcccacagtctcctcagtcatcccctcctcctgtgtcccctccacagtcccctcagtcatcccctcctcctgtgtcccctccacagtcccctcagtcccctcctcctcctgtgtcctcccacagtcccctcagtcccctcctcctgtgtcctcccacagtctcctcagtcatcccctcctcctgtgtcccctccacagtccccttagtcacctcctcctcctgtgccttcccgcacagtcccctcagtcacctcctcctctgtccccccccacagtcccctcagtcacctcctcctcctgtgccctccacaacagtcccctcagtcatcccctcctcctgtgtcctcctccacagtcctctcagtcatctcctcctcctgtgtcctcccacaacagtcccctcagtcatcccctcctcctgtgtcccctccacagtcccctcctcctctgtcccccccacagtccccagtcccctcctcctcctgtgcctcccctccacagtcccctcagtcacctcctcctcctgtgtcctcccacaacagtcccctcagtcatcccctcctcctgtgtcctcccacagtcccctcagtcacctcctcctcctgtgccgtcccccacagtcccctcagtcacctccttctcctgtgcctcccctccacagtcccctcagtcacctcctcctgtgtccttccacagtctcctctgtcacctcctcctcctgtgcctcccctccacagtcccctcagtcatcccctcctcctgtgtcctcccacagtcccctcagtcacctcctcctcctatgcctcccctccacagtcccctctgtcacctccttctcctgtgccctccccacagtctcctctgtcacctcctcctcctgtttccccctgcattccccctgtcacctcgttctcctgtgcctccccacccccacagtcccctcagtcacctctgcctcctgtgccccacccccacctcctgccactcaatgcccctccccacagaggagcagtcgccctcctgccagctcctcacggagcttcgaaacttcaccaaagggacctgttacctggaccaggtagaagtgagctactgcagtgggtactgcccatccagcacccatgtcatgccagaggtgagccagggacctgctgtccaggccaggggaatcacgttggccagtggccaccgagggctgccctgagcctgggacctgggcagaaccagagtccatgaggcacaaggtgcttctgatggagataacagtggagttggggaggcagatggtcagagctttccccaaggcagtggtgtgcacctgcaggttggcccagaggtttcactgggtgcctgaccccctcccacagaggtcttctgtggccccacaccattcccagagtgtgcccgctgtgcccttcaaggcaatgagccaggagcccagcaaagaaaggcatggaggagctaagctagcctctgacatcagaacccatcacacggtgcatgagagcatgagagctctgccggaatgcactttctacagagaggatcaccgcacacatttcctgcaagctgtccgagccaggctggctctgagtcttgggcaggtggctccgctctgcgtttgccctctgtggacccagaagcccctgatccttcttaggatcttccaaggggctctgtgcccaccctgactcccctcagcctgatgagctgtaacctgagctgcctcctgccagggtcctctctccagcttcactcacactactcctgcctgcccctaggcccacctcccagcactctgcggccatcccttctgcttcagcctacctggtttacctcatcctggaagacaaggatactttcctacctggtccccaaagacacagcccctcaaccctcggccgctctacggctcccccaggcgcgccctggacctcctggaaatactttcccaaatcactttcggaattttttttcacacttttagaatttttaaaacatagagtgagaaaagagagaaagtaattaagagatgcttttttttttttcctgaggaaagaaattgatagtgggatacaaattggagggaaattttttcgctgaaaaacctcttgcagtttttgaacctggcattgtatgaatgtactacccatttaaaagtaaaattataaatagaattatacataaaattaaatgatatgcttataggactctgatataggtgctttaaccacagtgcacagggatctgctttggagtgaaaactcactttgcacttgggatcagaactatgcagttagaactgacttatttgtagtttcatagattataactctgtctgtccaactagactctaagccccttgcggtagaagtatgtccttccccctgcagccaggaggcactgatgggaacgttaaaagtattcgtttaacctgtaggttgttggacattcagacagtgggggtgaaggaggtgggcttcttgcaaaaggggcttggcagtggcccagccaccctgctcagtgaagagggtgggatctggccctcccaccatcccaccctgcctaagatgggaaaggccaagggaggggaggaaactccatttggccctagttcacccgctccctctcgcccaggagccatacctgcagagccagtgtgactgctgcagctaccgtctagacccggagagccctgtgcggatcctgaacctgcgctgtctgggtggccacacagagcccgtggtgctgccggtcatccacagctgccagtgcagctcctgccagggtgggtctgggcagggaggggacggggcaggagcctgggcaaggacccagtgttgtgaaccagacccaggaacacacgtgtagctcctcactccatccttcttccttgagtccttccagtccacgtttttccttcttctcggtgttcttgttaatttcatctcctatcatgcatacttgtgggtgtctggggtagttgcacctagttcaaaccccagctcatctgtttcctttgtttccttgctcagcctccctgacatcatctttttttttttttttttttgtgatggggtctcactctgtcacccaggctggagtgcagtggtgtgatctcggctcactgcagcctggaactcctggtctcaggtgatccttccgcctcagcctcctgagtagccgggaccacaggtcacaggtgtgagccaccatgccgggctaatttttcttttccttttttttttttttttttttttctgtagggacggggtttcgccatgttgcccaggctgttcttgaactcctgggctcgagtgatccacctgcctcagcctcccaatgcgctggggttacaggcaggaaccactgcacccagccccctgacctcatcttttaagcaaggctgacattgctatgcaggcttgttgggtggacttggtgagggcacgcgtgtgaagtggctggcaggtgcctagttctgttaagcacctgccatatgataacctgaggtcccactgtgtggcagatgaaggggaaacagaggtggaaggcacccgtgccacctgggtggagcacagtggaaggcctggtgttggctctgggcgtcctcctggcaccagcctgaccactctgcctctcttactaacccatctctccctcacgtgtcccctgggaggtgacttctcaaagcgctaacaggctccgctgggtgagtccacagctgtccctcttgtgatcatgggactcagcagcactgaccacgtccttccacgctctctcacctgcccccaactgggggcccatgacttggcattagcatgttccaaataaagtgatactggcaacaaat

SEQ ID NO: 855 - DNA, 2304 bp, Homo sapiens
cttcctccacctggacacccagggctgctactcagggccctgcccaggtgagtgttcaggggaagtgaaatcacctctctacttttcctaccttgggagattcagaaaataaatgttcctagttcccggatcatcccttaaaataagcctgccctgtctgtgcccccatgttttgctcagttcctttcctcttcccaccatctcttccctcggggccctccttgtagggtgagagggcgtccagccagctgggcctttcaggcccctcttgcctgtttcctgtgcagggtctcggcagggctggggtgagagggagggcaggcaggggagaggtgggctgacacacccctccggtccctagaggagtgtgtgtggagcagctggagcagctggacgcgctgctcttgccgggtgctggtgcagcagcgctaccgacaccagggcccggcgtcccgaggggccagggcaggcgccccctgcacgcggctggatggccacttccggccttgccttatcagcaactgctctggtgaggctccagcagcaagttaaccagggagctgcgcagggcagcagccaccaagggtccctgctggaactccctgctcccctcccctcacagccaatgtagtgccccaagacctcagagcagctgcctgcgcccgtgcctgccctcaaacccagctgctcccctgctccccccagatactccctcatcacagctgcgaccccaatccctcaccacaatttgtccaccctgcagctgccggcccgcctgtggctttggcccatgtagctgccctctaggagggtgtcttacccagctcctgctgcggctgccctccatctctgcccctctgtctcccatctctgcccctctgtctcccatctgccaatttctggagcacctgccaaggcccctcactcctgcagccccctcctcagctgcctcctccaggcatcttcctggctctccaaggcccaacccatcctgatccttccctggaggtgcccacaggtgctgagtggatgccagatgggggatactggtctgttccaacttgcggagggtgggcatcttgtactctcaccaggtgaccccaagggcctcagtagagccacgcggcatgtgctctgggctttgggagtgatgtctctgggctgttcccccacaagcctgcctctcccccatctcccccagaggacagctgcacgcctccctttgagttccatgcctgcggctccccctgtgctgggctctgtgccacacacctgagccatcagctctgccaggacctgccaccctgccagccgggctgctactgccccaaggtgagagctgggagctggagcaacttccaaggagaagggggtcttctgcccacactcctgctcctccttctttctgtgatgtccatggcggccccacctccttcaaaccccttggaactcggtgcctcctcccagcttgccattcactcggcatcatgcatatgcacctgctgcaggcggggcacagtgctgggtgctgggatgacacgatgatcactgccccatctctccttccacccaggggctgctggagcaggctgggggctgcattcccccagaggagtgtaactgctggcatacctcagcagcaggagccgggatgaccctggcccctggggaccgcctgcagctgggctgtaaggagtggtgagtgatggtggaagggagacagagggctggggccagggaatagggcagggaggcctggggggcccagtccagcctcaggacagaggaccctgagatgctagagtttgcagctccctcatcttgccccaaatgtgcctaggggtcaggttacccttgcatgaccacccccaccccccggaggtcctggactgggtcctgcctcccttagtctaccctgactaccccctcccacagtgaatgccggcgtggggagctgcactgcaccagccagggctgtcaaggtaaccctgacctatggagacaacagtccccattgcttgggactgggggagtttctgggatgcagaactttcagtgctaagacggggacagtcccaggcaaactgggatggtgggtcaccttaccctgcccccacaccaccctcagcctttctgtttccagcacttcctggtcatgaccctgagcccctcctgcctgtccaccagggtctctgggcccaggggtggtcactgggaagggcacccacaccctgtccttccaggtcttctgcctctgagtgagtggtccgagtggtcgccctgtgggccctgcctgccgcccag

SEQ ID NO: 856 - DNA, 7421 bp, Homo sapiens
agtatgagccgcacagcctacacggtgggagccctgcttctcctcttggggaccctgctgccggctgctgaagggaaaaagaaagggtcccaaggtgccatccccccgccagacaaggcccagcacaatgactcagagcagactcagtcgccccagcagcctggctccaggaaccgggggcggggcaagggcggggcactgcatgcccggggaggaggtgctggagtccagccaagaggccctgcatgtgacggagcgcaaatacctgaagcgagactggtgcaaaacccagccgcttaagcagaccatccacgaggaaggctgcaacagtcgcaccatcatcaaccgcttctgttacggccagtgcaactctttctacatccccaggcacatccggaaggaggaaggttcctttcagtcctgctccttctgcaagcccaagaaattcactaccatgatggtcacactcaactgccctgaactacagccacctaccaagaagaagagagtcacacgtgtgaagcagtgtcgttgcatatccatcgatttggattaagccaaatccaggtgcacccagcatgtcctaggaatgcagccccaggaagtcccagacctaaaacaaccagattcttacttggcttaaacctagaggccagaagaacccccagctgcctcctggcaggagcctgcttgtgcgtagttcgtgtgcatgagtgtggatgggtgcctgtgggtgtttttagacaccagagaaaacacagtctctgctagagagcactccctattttgtaaacatatctgctttaatggggatgtaccagaaaccacctcaccccggctcacatctaaaggggcggggcgtggtctggttctgactttgtgtttttgtgccctcctggggaccagaatctcctttcggaatgaatgttcatggaagaggctcctctgagggcaagagacctgttttagtgctgcattcgacatggaaaagtccttttaacctgtgcttgcatcctcctttcctcctcctcctcacaatccatctcttcttaagttgatagtgactatgtcagtctaatctcttgtttgccaaggttcctaaattaattcacttaaccatgatgcaaatgtttttcattttgtgaagaccctccagactctgggagaggctggtgtgggcaaggacaagcaggatagtggagtgagaaagggagggtggagggtgaggccaaatcaggtccagcaaaagtcagtagggacattgcagaagcttgaaaggccaataccagaacacaggctgatgcttctgagaaagtcttttcctagtatttaacagaacccaagtgaacagaggagaaatgagattgccagaaagtgattaactttggccgttgcaatctgctcaaacctaacaccaaactgaaaacataaatactgaccactcctatgttcggacccaagcaagttagctaaaccaaaccaactcctctgctttgtccctcaggtggaaaagagaggtagtttagaactctctgcataggggtgggaattaatcaaaaacctcagaggctgaaattcctaatacctttcctttatcgtggttatagtcagctcatttccattccactatttcccataatgcttctgagagccactaacttgattgataaagatcctgcctctgctgagtgtacctgacagtagtctaagatgagagagtttagggactactctgttttagcaagagatattttgggggtctttttgttttaactattgtcaggagattgggctaaagagaagacgacgagagtaaggaaataaagggaattgcctctggctagagagtagttaggtgttaatacctggtagagatgtaagggatatgacctccctttctttatgtgctcactgaggatctgaggggaccctgttaggagagcatagcatcatgatgtattagctgttcatctgctactggttggatggacataactattgtaactattcagtatttactggtaggcactgtcctctgattaaacttggcctactggcaatggctacttaggattgatctaagggccaaagtgcagggtgggtgaactttattgtactttggatttggttaacctgttttcttcaagcctgaggttttatatacaaactccctgaatactctttttgccttgtatcttctcagcctcctagccaagtcctatgtaatatggaaaacaaacactgcagacttgagattcagttgccgatcaaggctctggcattcagagaacccttgcaactcgagaagctgtttttatttcgtttttgttttgatccagtgctctcccatctaacaactaaacaggagccatttcaaggcgggagatattttaaacacccaaaatgttgggtctgattttcaaacttttaaactcactactgatgattctcacgctaggcgaatttgtccaaacacatagtgtgtgtgttttgtatacactgtatgaccccaccccaaatctttgtattgtccacattctccaacaataaagcacagagtggatttaattaagcacacaaatgctaaggcagaattttgagggtgggagagaagaaaagggaaagaagctgaaaatgtaaaaccacaccagggaggaaaaatgacattcagaaccagcaaacactgaatttctcttgttgttttaactctgccacaagaatgcaatttcgttaacggagatgacttaagttggcagcagtaatcttcttttaggagcttgtaccacagtcttgcacataagtgcagatttggctcaagtaaagagaatttcctcaacactaacttcactgggataatcagcagcgtaactaccctaaaagcatatcactagccaaagagggaaatatctgttcttcttactgtgcctatattaagactagtacaaatgtggtgtgtcttccaactttcattgaaaatgccatatctataccatattttattcgagtcactgatgatgtaatgatatattttttcattattatagtagaatatttttatggcaagatatttgtggtcttgatcatacctattaaaataatgccaaacaccaaatatgaattttatgatgtacactttgtgcttggcattaaaagaaaaaaacacacatcctggaagtctgtaagttgttttttgttactgtaggtcttcaaagttaagagtgtaagtgaaaaatctggaggagaggataatttccactgtgtggaatgtgaatagttaaatgaaaagttatggttatttaatgtaattattacttcaaatcctttggtcactgtgatttcaagcatgttttctttttctcctttatatgactttctctgagttgggcaaagaagaagctgacacaccgtatgttgttagagtcttttatctggtcaggggaaacaaaatcttgacccagctgaacatgtcttcctgagtcagtgcctgaatctttattttttaaattgaatgttccttaaaggttaacatttctaaagcaatattaagaaagactttaaatgttattttggaagacttacgatgcatgtatacaaacgaatagcagataatgatgactagttcacacataaagtccttttaaggagaaaatctaaaatgaaaagtggataaacagaacatttataagtgatcagttaatgcctaagagtgaaagtagttctattgacattcctcaagatatttaatatcaactgcattatgtattatgtctgcttaaatcatttaaaaacggcaaagaattatatagactatgaggtaccttgctgtgtaggaggatgaaaggggagttgatagtctcataaaactaatttggcttcaagtttcatgaatctgtaactagaatttaattttcaccccaataatgttctatatagcctttgctaaagagcaactaataaattaaacctattctttctgtgtgtgtgagcgtgcgtttgtgtttggtagtgttcctagggcagaggtggagcagggatgcacttatcatgggaagggaggtagaaaagagaattggatagcctgtgatctttggtggaatttattccttttgcctaggcctttcagaccctgcttgatttccgtagacacttcaggttgtggcaagggagagctggtctgcaatcggaagtaccagcctcttccctagagcacaactagaaagaagaactatagagtgttataagggaggccctgagatggaaggaccatcacacagaaatgataatatcttcatttcagggtgttccaggggaaaagcaggagaaagatttggggctcagtagaaggaaaagcttcctagtggtaagagtgattggcaataccatgaggtacctttaaaagatagtgaactcctgtccttggaaatattaaaccacaggctagatatcatttaatagggatgtgaagtagagtaagtcactgcccttggtgtgcaattgtgaacttgtcaatttctgaggtccctttctacttagatatataatacaagatttctattaggtatgggtgctctgatgataatgaaaatcccagcagctatgtatgggatggttacaccagacactgtgctaaggattttctttgaattgtttctcactcaatcttcacggtagctcagtgaggtaggtaccattatcactgctagaaagcagtgaacttatatggtcttactgtggcactgggtccttaaacattatgcaaaactgtgagcaacttttatcggtttgttcttttaagaacataacacagcactctaaaaatagatctaactagattgttcacatctagcgattaaggccaccctgagattatagctgcatcatcaggaacccaagatctgaagcattcagtcaaagcctcttggccacctctctttttgtcatggccttcttggacttggagggggagaatggaagcaagtaccaaggagaaagtgttctcagaaaagccacacccattagaaaaatacaaggcctgaaaggtgtgagtgggacttgacacggaagagcatttcaagcttaagaaaaaaaaaaaaaagaagaatgtgggaggatgtcagcaacaatgcttgagattccctggtcccccaaagagtctctcctccataaaactaatgagaatgtgacaaaaatagattcaacttcttatagctctggaaattaactgaagatgtatagcaatttgcagagcatttattcaagaaaaagactaaatctctgtgagcactgtgatattgtaacttgcactactctcatctccccctctccagctccacaatagctttgaaaccaacagcctgcaattaccatgaaaatcagcagtctggcagccactgaaggtgacagaatggagttggagttctttcaaagtcccattcctagacaattgtcactatttgacctgtttggcaggccctggaagctccacttgcaaggctatatttgacctgactggaagcttcccagggtaaaaaactttgtcaaaacaactagaggcaattgattctctttgtggctgcctggggtaatgtataacagttggggaaagcaattggctaaataaaaagcctaaaaggagaagctggaaaaagagattttcatagggactttgaaaagctccaaagtgttattggcaatctagactgccaaatgcataaataggactccatccatgcccaggactgtgcagatgctcaggaaaaacccaagaaagccttaagctctcacttcaagctgatcttgaggctctgcacaagccataagtaaagggaatgcagagttgtcaattgcatggcggagtgttgagtgtgcctcagcattcacacagagctccttggcagagactggttgaattattgattccaagtgtttgaggaaatccgtgtacaactattagatgactactaaccaagcagagacttcagtgtccacacacaacaaaaaatacagactttacagaattagttcagaaaagtcattaaacaaagaaacaacaacaaaccctggggaaatgacagtacgatcaaaccatgcatggccctgcctgcatgtgggaatcctcatccaagtcatactttctaaacatcataaaaagcccaaaccagtctcctttcctggctctctcaagtcattttcagaccaggttaggagacgtgagctgctctccacaaaaagcctcatgtgagtaataaatgtttcatactctcttggggtgtgtgtaacatcatcagtctcagcatctaaaccaaattttggtgacatttcatcttgtttatgcagatgtccaccacacctataaataaacaaactactgaaactgattcaagaaaaaataaaaatctgaatagagctatcacaagtaaagagattaaataagcaatcaaataacttcccagaaagaaaagcccaatttaggatgtcttaactgattaatgttagcaaatatttaaagaagaattggtacaaattcttcacaaactcttccagaaatggaagaggaggaaacactttccaccttattttctataactagtattaccttgataccaaattctgacaaatacatcaaaaataaaaccatagaccaatatctcttttaagtgtaaatgcaaaaaaattcaacaaaatgctagataactgggtccaacaacatatggaaaggattatataccttgaccaagtgggatttgccccaggaatgcaagattgatttaaccatcagtgtaatgcatcatattaatagaataaagacagaaaccacacaatcatctcgatacacgcagaaaaatcatttggcaaaattcaacacccctttgtaataaaatcactcaacacactaggaagagaagggaacttcttcaacctcacacatggcatctatgaaaaacccacagctggccgggtatggtggctcaagcctgtaatcccagcactttgggaggctgagccaggcggatcacctgaggtcaggagttcgagaccaacctgaccaacatggagaaaccctgtatctactaaaaatacaaaaaattagcccggcgtggtggcaaatgcctgtaatcccagctgcttgggaggctgaggcaggagaatcggttgaacccaggaggtggaggttctggtgagccgagatcacgccattgtactccagcctgggcaacaagaacaaaactctgtctcaaaaaaaaaaaaaaaaagaaaagaaaaacccacagctaacatcatacttaaaggtgaaagactgaaagctttcccccaagaggaactaacaggatatctgctgtcactatttttattcaatattatactggaggttctacctagggtaattaggcaaaaaaaaaaaaaaaaaaaaaaaaaaaaaa

SEQ ID NO: 857 - DNA, 298 bp, Homo sapiens
ttcttttttttgagacagagtctcgctcagtcacccaggctggagtgcagtggcgcgatctcggctcactgcaagctctgactcccgggttcacgccattctcctgccttagactcccgagtagctggcactacaggcgcccgccactacgcccggctaatttttttgtatttttagtagagatggggtttcaccgtgttagccaggatggtctcgatctcctgacctcgtgatccgccgcccatctgggcctcccaaagtgctgggattacaggcgtgagccactgcgcccggccaa

SEQ ID NO: 858 - DNA, 2649 bp, Homo sapiens
cttgtaggtactcattgaggtttattgtgtaagatgaatgaatgttgcaaattcctaaacatgtgattcagatgcccaatcttactctgttactttatgaaaattttttaaagctatatgatgttatatcaaaatatgttgttatactttaggataatcggtgtgttagccctgaatttcagcataagtcccatttttttccatgggagtctaggaaagctatatgtttattcagcagcaaaatacagtttggaacttaaataaactattgatcaatttctggtcttatgctagaaggaataaagcatcaagaaaaagaaaagatttgctgtcaagaccaggaaaatttgacaatagagtattagaatgcaggaaatgaggggaagtggaaaggcagcaagtaggagagaaaaagtgcagggacagtagaaagtgaatgtaggagctttctgacccatgcacttcaggaacgcaattcatccctaaaatgctgtttgctgtcttaggttgcaagtaaccaaattaaaaccagtttgaaagtagagtgagacagctgtcatcataagagtcatttgatctgtttaaaggtggctgcttgtatgcagggaccaacagtcatgttcagggcagcagctggtgcacacttcaagcacagaccataagagctaccccaggcagcacctgctaccaatagtgcaaacaactcagagagacctcgttggcataagggaatactctatcctttctgagtaaagagcaagtagaactaaaggtttcacattttaaacatactttacattcctcctcttctggggctcaagcctacttttgggccaaagcggatgttatatctgacatagagtcctcggagcagcagttgttcctgaaagttcctttttgcatctttgtgcctcatgcagtggcttacaagtcaaccagacttctcccctgacttttgatgtgtaagagcttgtgtttcaaatgggtttggttttcttaatgtcaccctaggttggtggaaaggagagtaaatggaaatggggggagcagggtcccctggggaggtttaaacagatggaagtcaattgtctcttgagaatagaggaggctattgagttttcattccacactctgctcctgttctgtcagcaaagaacaagcactactctccagcaattgctttccactggactcccccacctcggcctccctacaaaaacctagggatcaacttagttcactccaaattagaaaatttaatagtcatttgtttcttcttgtccacagggagaaccattttctttccttctttcaaaattgcccaggtcttgtgaagggttattaacaccggaaagaaatacattttaataagcttaaatctcatttctacatgaaaccatcagattttagtactgtgatattttggtccctctgtcttttaggctctgacaccaaaattgccataatgaaggtgtttcacttcttctcatttatttttatgggatcttttattcccaaatgccttttcatcccagccaaagggagaaatgttgatagatctgccatcaagaaggttccaaagctggcctgtcaggttttctgttttcttgtttattatctttgaacttttgttttaaatgttttaaacacttatttaccatgtaactaaatgtctgatagtattgaaaatactttgtgggttttaatttatttaatgctcatgaaaccctatgaggtaggtactgatattatttttattttactgatgaggaaagtgaagcaaagagaagtgaaatgaaaggtagtgagtgatgggaccagggtttggacatgggcagtctggctctaaaatgtatgcttttaactactatgtaatgctgcctcacaaacaacttgtctcacaaattgatattctggatcagaggatgtcgactggcccgcaaatgtattttgtatggctcatacacagttcagaagttttaaaaatttacatagaaatctgcatttcctgacttcttttgaaaatgggaataccaaacatcattaggcttgaattcccaatacggcaacaacagctgagcaacaagcagctgtttagactaggcactcgctctccaatttccacagtccccaccaatgcagatcatagtatcgacttaaatttcctgcctgccttagagaagcttctgagcttgtgacctctattctagctgctctatgaatggacgctgccccagtacagcgaggacctgctgcaaaatgcatttcttagtcttcaatacttattcctccttgtaactggatttctggtaagttatgtctcatggtggatctgccccaaagatggagactgaatggcagtgagtcactcgccctggcctccattgttctggagaaggttccagccacatggttgatgtcagctggttttccagagccagagctgggttgcgggacagacacacctgcatctaatagtgaaaggcaaagttgaaaggccaagaccagcctgaggtctgagggaccaagggcttcacagaggccagaagttcagaggtggacataaaaggtgttaggagaataaggaagtgaaaagaacatagtacagtgtatcagaggaggagctccaggctggcaaatatcactccc

SEQ ID NO: 859 - DNA, 2649 bp, Homo sapiens; identical to SEQ ID NO: 858

SEQ ID NO: 860 - DNA, 190 bp, Homo sapiens
atgagaaagtaaacatacaacacagtaaaagttgttccaagtatttaaaaatgttctatatcttctaccttattatggctcaagatatagtaacttttgtggggttttatcattgtttttgttttattttgtgaaaacatccaagagcccgcaacagcctatagatttgcagatccttttctttcctggg

SEQ ID NO: 861 - DNA, 190 bp, Homo sapiens; identical to SEQ ID NO: 860

SEQ ID NO: 862 - DNA, 13077 bp, Homo sapiens
atcccatttgaagtggtggagaaagtttacccaccagtgcctgagcagctacagctccgaattgctttttggagcttccctgagaatgaagaggacattcggtgaggccaaaggactgatggtggggagcggggtcctgatactccacactgtctgctgggtttcccatagaacaaaggagacattgtatttggggcagtggtaagaggaagacaagggagggattgcctgggattccactccctcccccccaccccccgccctggggaaggaatgaggctagggagagagtgcctagggcattgtggtctctgacagggtctgccaaaggttatttgctgagttgtggctgtgtcctcttcttcacccccaggctgtattcgtgcctggccaatggcagtgcggatgagtttcagcgaggggatcagctcttccgcatgcgggctgtgaaggacccattgcagataggtgagtgggccatcatgccatgtggcacatcctgctcctcccatcccctggcttatgaagtaagaacacaccgcaagaagctggagcatgttgtctgaataactgcagggccagggtcaagggcagagacccaggtcctgacagcactccctgaccatgcccccatttctccccagggttccacctgagtgctacagtggtgccacctcagatggtccctcctaaaggggcctacaacgtggctgtgatgtttgaccgctgccgggtcacttcctgcagctgtacctgtggggctggggccaaatggtgcacccacgtcgtggcactctgtctcttccgcatccacaacgtgaggccctcccaatttatcccggccctatcctacactccatcccccccttctctgctgcatgcctggctacaatgtgagccccctcgcctcgcctactctgcctctctgtcccccagctccagctccagcaaacctgttctcagattgttccatttttctctgtgtccccttcaggcttctgcagtctgcctgcgagccccagtctcagagtccctgtcccggctacagagggaccagctgcaaaagtttgctcagtacctcatcagtgagctccctcagcaggtgggtgaggtcggcaccccctcctgcaattagctccgggccaggccgcataacagccttcctgttaggcccaggcctccatgggttcacctaggccgtgttctgcctgcctccgtctctttctccctcagatcctccccacagctcagcgtctcctggacgaactcctgtcttcccagtcaacagccatcaatacagtgtgtggagctccgggtgagtgtggtgagaaagattggcagtaggaagaaagccagcttgtagtacagagcgccatttactcaaggcttgctgttgtcaggcaaatccaggcccctatctctagatgactgactgcctgtcatcctcagaccccacagcagggccctcagcatcggaccagagtacttggtatctggatgaatcgacactcactgacaacatcaaaaagacactgcacaagttctgtggcccctcccctgtggtcttcaggtaaatcggatctctgcatacctgtgtctgtggtggagggggagcgtccctcaggctgatgacagatcctttcttctattcatgcctgtgacccctaccttttattccctgaactggcacagtgcctggcacacagttgtcactaacgaattgatggaagatgatgaccttgtacagtcacagagtggtctgctcttacctagcaagagttccttttcttcttttgatagatcaggaaatggaaacagagaaagattttttaaagagtttttgtggctgggggcggtggctcatacctataatcccagcattttgggaggctgacgtgggcagatcacctgagatcaggagttcgagaccagcctggccaacatggcgaatctccatctctactaaaaaaacaaaaattagccaggcgtggtggcgggcgcctgtaatctcagctacttgggaggctgaggcaggagaattgcttgaacccgggaggtggaggttgcagtgaggtgagatcgcgccattgcactcaagcctgggcgacagagcaagacttggtctcaaaaaaaaaaattttgttacagatgtctttttccctctatcttctgtattttggggccggaagcccttttaggtttcattcagccccgtcttactgtcatggttttctgttcctctgcttttacagtgatgtgaactccatgtatctgtcttccacggagccgccagccgctgctgaatgggcatgtctgctgcgccctctgaggggccgtgagccagagggcgtctggaacctgctaagcattgtgcgggagatgttcaagcggagggacagcaatgctgcccccttgttggaaatcctcactgaccagtgcctcacctatgaacaggtaatcactcagcgttggggagccccgtggtagctcattctttccctccccctgcctcatcctcctcttgctgaaatggactctgggagggctactctgcctttctctgagctctcaggtgcagctcacagccttctttgtctccagataacaggttggtggtatagcgtacgtacctcagcctcacacagcagtgccagtgggcacacgggccgtagcaacgggcagtcagaggtggcagcccatgcctgtgccagcatgtgtgacgagatggtcacactgtggaggctggccgtgctggaccctgcactcagcccccagcggtgagtctcccctgaggctcaccacagaactgagcctgggccagctcaggacagactgagccttcatctccttgtttgcagagacataccatgattttagtcctcgggaaacgggaggtgctgagcactggtgttagcagtgatttacgagtcctttttctgagaggctttcatccttccttcccctaaataacacccacttttcaaaattctccagtgtttcagtgatgcttatggggctgggtcaagaagtactttcctgtatcctttccccatgcctctctttggggtgtacacctactccatgcccatcctttcccagtagcccctcagcagcctcctgccccttgttcccacaggcgccgggaactgtgtacgcagctgcggcagtggcaactgaaggtgattgagaacgtcaagcggggccaacacaagaagacgctggagcggctcttccccggcttccggccagcggtggaggcctgctacttcaactgggaagaggcctacccacttcctggtgtcacctacagcggcactgacaggaagctggcactgtgctgggcccgggccctgccctctcggccaggtgcctcccgctctgggggcctggaggaatcccgggaccggccccgaccccttcctactgagccagctgtgcggcccaaggagcctgggaccaagcgaaagggcttgggtgagggggtcccctcatcacagcggggtccccgccgcctctcagctgaagggggagataaagctctacataagatgggtccaggtgggggcaaagccaaggcactgggtggggctggcagtgggagcaagggctcagcaggtggcggaagcaagcgacggctgagcagcgaagacagctccctggagccagacctggccgagatgagcctggatgacagcagcctggccctgggcgcagaggccagcaccttcgggggattccctgagagccctccaccctgtcctctccacggtggctcccgaggcccttccactttccttcctgagcccccagatacttatgaagaagatggtggtgtgtacttctcggaagggcctgagcctcccacagcctctgttggcccccctggcctactgcctggggatgtctgtacccaggacgacctcccttctacagatgagagtggcaatgggcttcccaaaaccaaagaggcagcccctgcagttggagaggaggatgatgactaccaggcgtactatctgaatgcccaggatggggctgggggcgaggaagagaaggccgagggcggggctggggaggagcacgacctgtttgctgggctgaagccactggaacaggagagtcgcatggaggtgaggggatggaaggagggagggctgggtgctccttagccacaactgggaggggctatctagctctagttgggagtgtcaggaccatcagcaggattgtgagaaccctgttgcaggcgccgaactggtctccctgctttcagtctactcacttttctgcttccacgagattttcctgaaatgtgatggtgtcactctgctgcttaaaacccttcaatgggttcctgttgcccttatgataaaatgaaagtggttggcatgacctgtgagggtccacttgatctggtctttgcctgctttgccagcctcacttggctgctctgtcctttgcactccagtcagctgaatcactcatgtatctgccatgctctctctcttgcctccaggattttggacagattgacctttctgcctggaatgctcttccccattagcccgtgtttctccttcaggtctcagggatcttaaagatcacttcctctagggagtctctctgatactgtccctgtgccccaagatatcccacctgcttccccttgacctttccctgtaatagctggcatcacggtggcatgtgtgtttatgtgtctgtctttctaaccagagctcctatggagcggcacagggcctggcatgtagcaagtgttcaaggaatgttggctgcatgagtgagcatgatgtcctgctcctggaagttgggactttaacctgtctggtcccatgtcctccttccaggtactgtttgcctgtgctgaggccctgcatgcgcatggctatagcagtgaggcctcccgtctcactgtggagcttgcccaggatctgctagccaacccacccgacctcaaggtagagccgccccctgccaaggtgagagacccccttcctctaccttcccctcccccacttacccccaacctgctcccatgccccaccccaagtgagagcatccttctacctccaccaaggtaagtcagaatcatctgcctgtctcctgtgtttcttccctttctagggcaagaagaacaaggtatccacgagccgtcagacctgggtggctaccaacaccctgagcaaggcggccttcctgttgacagtgctaagtgagcgtccagagcaccacaacctggccttccgagttggcatgtttgccttggagctacagaggcctccagcttctaccaaggccttggaggtcagaggctccatctcagccttgtatttcagtctctttagagccttgcaccttgatctctattgacacaccagaggtctgagctccttcctgtgccctcaggtgaagctggcataccaggagtctgaggtggctgccctgctcaagaagatccctctgggtccaagtgagatgagtaccatgcggtgccgggcagaggaacttcgggaggggacactctgtgactatcggcctgtgttgcctctcatgctggccagtttcatctttgacgttctctgtgctccaggtatgatgcctgaccctacagtaagtggggaactggggtaggggtagctttctctaagaaagaccaagagccccaagtttctgaatcacctttaggacccatcaggcagcttcatgggtaggtctgtgatgatgaggattttgggttcccctgtattttttcccatgcatgatacttctgtctgcctgacttaccccaacttttatacagtggtttctcccacaggttcccggcccccaagtcgcaactggaacagcgagacacctggggatgaggagcttggatttgaagcagcagttgctgccttgggtgagtcttgagcatatcaacgagctaagcctggttcaggtcttgaaggacatgagacctgtgccttgttgtgaagggctgtatggtaatgggaaggtcaggatgacatgtgtgagccaactagtgcctgtaagacaggaattcagggcaaaaatgtgtgctatatggctgggcgtggtggcccatgcttgtaatcgcagcgctttgggaggctgaagcaggaggattgtttgagctcaggagttcatgaccagcctgggcaacctagcaagacctcatctttacttaaaaaaaaaaaaaaaaaaaaaaaaaaaattagccaggtgtggtggcacatgccttgtgctgccagctactccagaggctgaagtgggagaattgctttagcctggagattgaggctgcagtgaactgtgattgcaccactgccctctagcctgggcaacagagtgaaaccttgtctcaaacaaagaaaaaaaaaattgtgtgctatgggtattgggtattgtaagggcagcaaaacaaaaatctagagaaaggcctaagggaagtggtagaatatggaatgtgggttaaaagatcagtaggtcctaaaccagcgaacaccatgagtaaatacacaacgcaatcaagttttcatgagaatgaggaggccagcttccctaaaatgataagtacatgctgggtaagcagattggacctggttatgaaggttttgaaaagcacaccagagcttaggctggatataatagtcaacgaagacttctataggtgatgtgggttggaccaagggaaccccttacttcatatgctgatggcttgggaaccctggcctcttacctttgctgtcttgggaattatgactactctcaatccccataaggtcctctttctcgcaggcatgaagacaacagtgagcgaggcagaacatcccctcttatgtgaaggcacacgtcgggagaagggtgacctggcattagcactaatgatcacttacaaggacgaccaggccaagcttaagaaggtaagagactggggctgggtgcggtggctcatgcctgtaatcccagcagtttgggaggcagaggcgggcagatggcttgagcccaggagtttgagacaagcctgggcaacatggcgaaaccccgtctctaccaaaaaatacaaaaaattagcagctgggtgtggtggcacatgcctgtagtcccagctactcgggaggctgaggtgggaggattgcttgaacccagtaggcagaggttgcaatgagctgggttcacgccactgcactccagcctgggtgacagagcaagaccctgtttcaaaaaaaaaaaaaaaaaaaaaaggcaaggtactggggcctttgacaggcagagaaagagagcacattttactacctttctcagggagtttccagtacaatgagaaaagtgctattttaggctgggtgcagtggctcatgcctgtaatctcagcactttgggaagcagaggcgggaggatcgtttgagaccaacctggccaacatagtgagaccctgtctctacaaaaaattagaaaattagccgggcatggtggcgcgcgcctgtagtcccagctactcgggaggctgaggtgggagaattgcttgagcccaggagtttgaggctacagtgagctataatcataccactgcactccagcctgggcaacagagcgagaccctgtctcttaaaaaaaaaagaagaagaagaaaaaaagaaaagtgctcttctgcccataggaggtaagtagggaatcttggggacatctcataaagaataagagaagaccaatggttcttataggagtgcttgggcatggggtggaagaagagaagcagagggcataaagtcattcattcacttatttcagtatttattgactatcagtatattctgccctgtggtgttaatggaggataccaagatatgttggggttaaataagttacaaaaagacatgtaaaccaggaggtcatcctgtggttgtaagtggggaaggctccctgaggatgtagcaattggctgtttcaaggagaaaggaaggtaatagaagtcaggagctaaagggcatcctgtcactgcttctctggaggtcactgcttctgtcttccagatcttagacaaactcttggaccgagagagccagacacataagccacagacgctgagttctttctactcatctagccgcccaaccacagccagccagaggtctccttcaaagcacgggggcccatctgccccaggggccctgcaaccactgacctcaggctctgcagggcctgctcaaccagggagtgtggcaggggctgggccaggccccactgagggcttcacagagaagaatgtgcctggtgaggtgggggcactgggcaggggggatgaatggtgtggacctatgttgaggtcccctttcctgggctcatcccagcgtcctgttttcctcacctagagagttccccacattccccctgtgagggtcttccatctgaggcagctttgaccccaaggccagaagggaaggttcctagccgcttggcacttggcagtcgtggaggctataatggacggggatgggggtccccaggacggcctaagaagaagcacacaggtaggatagcctgtgggctagcatagagggaaggataatcctgaaggttggagtcttaacatctgggactcctgacttctgagactgacttctcttgggggttaggcatggccagcattgacagcagtgcccctgaaacaacatcggatagttcccccaccttaagccggagaccacttcgagggggctgggcccccacctcctggggtcgaggtcaggacagtgacagcattagcagctcttcttcggactccctgggctcctcatcctccagtggaagtcgccgggccagtgccagtggaggagcccgggcgaagactgttgaagttggcaggtcagtgggaagaactccccatcttccctgatctggcccaccctcagagccacacccctagtgcaatccaaccattgtctcccagcatcctcactttccctggtccttcccaacctacccggatgcccatttcaaagaaaccccaacccccgtccctaccccattgccccttcaggtacaagggccgccgccccgagagtcatgcccctcatgtacccaatcagccatcagaggcagctgcacacttctacttcgagctggcgaagacagtgctgatcaaggcagggggcaacagcagcacttccattttcacacatccatcttcctcagggggccaccagggtcctcaccgcaacctgcacctttgcgccttcgagattgggctttatgcccttggcctgcacaactttgtttctcccaactggctctcacgtacttattcttcccacgtttcctggattacaggtaaatcatttgacctgacttgggtatgggagggggattaattggtggggataagacccttatctttgtggggttactgatctgataaaaagacattattctcacaccccagtggtgcccacactaacccaactctgcccttctctcctttcccctaaggccaggccatggagataggcagcgcagccctgactatactggtagaatgctgggatgggcacctgacaccccctgaggttgcatccctggctgacagggcatcacgggcaagagactccaatatggtgagggcggcagcagagctggccctgagctgcctgcctcacgcccatgcattgaaccctaatgagatccagcgggccctggtgcagtgcaaggaacaggtatttctacgggcaatctgggaacctcttctggggcatctgggcagggaggttgggcatgggaaagctaagggcccagctcttgattcccgtatcctggagtttacagatgattgttggtcctctcatggcaacattttacccattaatgtgctttcacacccatctttcctttaccttacaactcaaaggttaggtttatttctattttacagataaggaaatggaggcctacggtttagggaccaagatgatcactcaggatagaaaacttagggaaggcctcatacatctaagacttgaatgggagggggctgttaaattagtttggaactgggactataacctgggtcttgactcattttggtcagtatttactcagtgtgtgaagcactcactgctctgataatggactctaagcattgacactgacctctgatgattccctgggaatgagacagctctgagggagacattggaatctcatctaacaccttccatgtggtaaaggcctttcccccttaacactctgtgcccctctcttccaggacaacctgatgttggagaaggcctgcatggcagtggaagaggcagctaagggtgggggcgtgtaccctgaagtgttgtttgaggttgctcaccagtggttctggctgtatgagcaaactgcaggtggctcatccacagcccgtgaaggggctacaagctgtagtgccagtgggatcagggcaggtggggaagctgggcggggtatgcctgagggtagagggggcccagggactgagccggttacagtggcagcggcagcagtgacagcagcagccacagtggtgcccgtcatatcggtggggtctagtttatacccgggtccaggactggggcatggccactcccctggcctgcacccctacactgctctacagccccacctgccctgtagccctcagtatctcactcacccagctcaccctgcccaccccatgcctcacatgccccggcctgccgtcttccctgtgcccagctctgcatacccacaggtgagaccagtgttctgctggggggtaaggcatgggaaaatactgggaattcatagggggttggagtgggtactctgggagtataattggtcagtcggagagtcctggtgaggtggtgggagtctgggggacccagcccaactaaaataagaaatgacggccgggcatggtggctcatgcctgtaatcccagcactttgagaggccgatgtgggtggatcacttgaggtcaggagttcgagaccagcctggccaacatggggaaaccccgtctctactaaaaattagctgagtgcacgcctgtaatcccagcttcttgggaggctgagatgggaatcacttgaacctgggaggcagaggttgcagtgagccgatatcgtgccactgcactccagcctggaggacagagcgagactctatctcaaaaaaaacatgtcaggatagcagcttgtgggggtgaagcacgacagcaacatcctaatcaagtttggcatcttcccctttcttctccctgcccctagggtgtgcatcctgcattcctaggggctcagtacccttattcagtgactcctccctcacttgctgccactgctgtgtctttccccgttccttccatggcacccatcacagtacatccctaccacacagagccagggcttccactgcccaccagtgtggcctgtgagttgtggggccagggaacaggtgaatggaggggaggcacactgggcaggggaggtggggagggaatgttctttgtctctctttgggctctgagttcctcacatggctctcaccccacttagtgagcagtgtccatccagcatccacgtttccagccatccaaggtgcctcactgcctgccctgaccacacagcccagccctctggtgagcggaggttttccaccgcccgaggaggagacacacagtcagccagtcaatccccacagcctgcaccacctgcatgctgcctaccgtgtcggtgagaggacatccctttctgtgctcctacctgcagttgtgccagtggctcttgcagaggacccttcctctagctcttcatttgtttactgtggggtcaggtgacaggttggggtaaagggtgaagaggatacaccgtaccatgtgcccacccttatctatctcccaggaatgctggcactggagatgctgggtcgccgggcacacaacgatcaccccaacaacttctcccgctcccccccctacactgatgatgtcaaatggttgctggggctggcagcaaagctgggtaacacctcccctccctaggaccattgccccccccccacctgctctccccaccttccttatcccagacctccttcctagctcttgctcagagttgaggccttggtcgggtatgtgtgcgtgcgcggggggcggagggttacctcagctcctggggtggagggaggctctctgccaggccagagctgagatctgtaagttgggtccctagggcagaggtggccacccccgtctcatgcccctccccctgccccccaggagtgaactacgtgcaccagttctgtgtgggggcagccaagggggtgctgagcccgtttgtgctgcaggagatcgtcatggagacgctgcagcggctgagtcccgctcatgcccacaaccacctgcgtgccccggccttccaccaactggtgcagcgctgccagcaggcatacatgcaggtgacaacctagaattatggagcagggtggagcacttcctgggtggtcttggaccagagggaggcagggcctgtttctgtgctttgtactaaggctcatcctgcacacatcctcctccagtacatccaccaccgcttgattcacctgactcctgcggactacgacgactttgtgaatgcgatccggagtgcccgcagcgccttctgcctgacgcccatgggcatgatgcagttcaacgacatcctacagaacctcaagcgcagcaaacagaccaaggagctgtggcagcgggtctcactcgagatggccaccttctccccctgagtctttcacccttagggtcctatacagggacccaggcctgtggctatgggggcccctcacacagggggagtgaaacttggctggacagatcatcctcactcagttccctggtagcacagactgacagctgctcttgggctatagcttggggccaagatgtctcacaccctagaagcctagggctgggggagacagccctgtctgggagggggcgttgggtggcctctggtatttatttggcatttataaatatataaactccttttttactctagtcga

SEQ ID NO: 863 - DNA, 13076 bp, Homo sapiens
atcccatttgaagtggtggagaaagtttacccaccagtgcctgagcagctacagctccgaattgctttttggagcttccctgagaatgaagaggacattcggtgaggccaaaggactgatggtggggagcggggtcctgatactccacactgtctgctgggtttcccatagaacaaaggagacattgtatttggggcagtggtaagaggaagacaagggagggattgcctgggattccactccctcccccccaccccccgccctggggaaggaatgaggctagggagagagtgcctagggcattgtggtctctgacagggtctgccaaaggttatttgctgagttgtggctgtgtcctcttcttcacccccaggctgtattcgtgcctggccaatggcagtgcggatgagtttcagcgaggggatcagctcttccgcatgcgggctgtgaaggacccattgcagataggtgagtgggccatcatgccatgtggcacatcctgctcctcccatcccctggcttatgaagtaagaacacaccgcaagaagctggagcatgttgtctgaataactgcagggccagggtcaagggcagagacccaggtcctgacagcactccctgaccatgcccccatttctccccagggttccacctgagtgctacagtggtgccacctcagatggtccctcctaaaggggcctacaacgtggctgtgatgtttgaccgctgccgggtcacttcctgcagctgtacctgtggggctggggccaaatggtgcacccacgtcgtggcactctgtctcttccgcatccacaacgtgaggccctcccaatttatcccggccctatcctacactccatcccccccttctctgctgcatgcctggctacaatgtgagccccctcgcctcgcctactctgcctctctgtcccccagctccagctccagcaaacctgttctcagattgttccatttttctctgtgtccccttcaggcttctgcagtctgcctgcgagccccagtctcagagtccctgtcccggctacagagggaccagctgcaaaagtttgctcagtacctcatcagtgagctccctcagcaggtgggtgaggtcggcaccccctcctgcaattagctccgggccaggccgcataacagccttcctgttaggcccaggcctccatgggttcacctaggccgtgttctgcctgcctccgtctctttctccctcagatcctccccacagctcagcgtctcctggacgaactcctgtcttcccagtcaacagccatcaatacagtgtgtggagctccgggtgagtgtggtgagaaagattggcagtaggaagaaagccagcttgtagtacagagcgccatttactcaaggcttgctgttgtcaggcaaatccaggcccctatctctagatgactgactgcctgtcatcctcagaccccacagcagggccctcagcatcggaccagagtacttggtatctggatgaatcgacactcactgacaacatcaaaaagacactgcacaagttctgtggcccctcccctgtggtcttcaggtaaatcggatctctgcatacctgtgtctgtggtggagggggagcgtccctcaggctgatgacagatcctttcttctattcatgcctgtgacccctaccttttattccctgaactggcacagtgcctggcacacagttgtcactaacgaattgatggaagatgatgaccttgtacagtcacagagtggtctgctcttacctagcaagagttccttttcttcttttgatagatcaggaaatggaaacagagaaagattttttaaagagtttttgtggctgggggcggtggctcatacctataatcccagcattttgggaggctgacgtgggcagatcacctgagatcaggagttcgagaccagcctggccaacatggcgaatctccatctctactaaaaaaacaaaaattagccaggcgtggtggcgggcgcctgtaatctcagctacttgggaggctgaggcaggagaattgcttgaacccgggaggtggaggttgcagtgaggtgagatcgcgccattgcactcaagcctgggcgacagagcaagacttggtctcaaaaaaaaaaattttgttacagatgtctttttccctctatcttctgtattttggggccggaagcccttttaggtttcattcagccccgtcttactgtcatggttttctgttcctctgcttttacagtgatgtgaactccatgtatctgtcttccacggagccgccagccgctgctgaatgggcatgtctgctgcgccctctgaggggccgtgagccagagggcgtctggaacctgctaagcattgtgcgggagatgttcaagcggagggacagcaatgctgcccccttgttggaaatcctcactgaccagtgcctcacctatgaacaggtaatcactcagcgttggggagccccgtggtagctcattctttccctccccctgcctcatcctcctcttgctgaaatggactctgggagggctactctgcctttctctgagctctcaggtgcagctcacagccttctttgtctccagataacaggttggtggtatagcgtacgtacctcagcctcacacagcagtgccagtgggcacacgggccgtagcaacgggcagtcagaggtggcagcccatgcctgtgccagcatgtgtgacgagatggtcacactgtggaggctggccgtgctggaccctgcactcagcccccagcggtgagtctcccctgaggctcaccacagaactgagcctgggccagctcaggacagactgagccttcatctccttgtttgcagagacataccatgattttagtcctcgggaaacgggaggtgctgagcactggtgttagcagtgatttacgagtcctttttctgagaggctttcatccttccttcccctaaataacacccacttttcaaaattctccagtgtttcagtgatgcttatggggctgggtcaagaagtactttcctgtatcctttccccatgcctctctttggggtgtacacctactccatgcccatcctttcccagtagcccctcagcagcctcctgccccttgttcccacaggcgccgggaactgtgtacgcagctgcggcagtggcaactgaaggtgattgagaacgtcaagcggggccaacacaagaagacgctggagcggctcttccccggcttccggccagcggtggaggcctgctacttcaactgggaagaggcctacccacttcctggtgtcacctacagcggcactgacaggaagctggcactgtgctgggcccgggccctgccctctcggccaggtgcctcccgctctgggggcctggaggaatcccgggaccggccccgaccccttcctactgagccagctgtgcggcccaaggagcctgggaccaagcgaaagggcttgggtgagggggtcccctcatcacagcggggtccccgccgcctctcagctgaagggggagataaagctctacataagatgggtccaggtgggggcaaagccaaggcactgggtggggctggcagtgggagcaagggctcagcaggtggcggaagcaagcgacggctgagcagcgaagacagctccctggagccagacctggccgagatgagcctggatgacagcagcctggccctgggcgcagaggccagcaccttcgggggattccctgagagccctccaccctgtcctctccacggtggctcccgaggcccttccactttccttcctgagcccccagatacttatgaagaagatggtggtgtgtacttctcggaagggcctgagcctcccacagcctctgttggcccccctggcctactgcctggggatgtctgtacccaggacgacctcccttctacagatgagagtggcaatgggcttcccaaaaccaaagaggcagcccctgcagttggagaggaggatgatgactaccaggcgtactatctgaatgcccaggatggggctgggggcgaggaagagaaggccgagggcggggctggggaggagcacgacctgtttgctgggctgaagccactggaacaggagagtcgcatggaggtgaggggatggaaggagggagggctgggtgctccttagccacaactgggaggggctatctagctctagttgggagtgtcaggaccatcagcaggattgtgagaaccctgttgcaggcgccgaactggtctccctgctttcagtctactcacttttctgcttccacgagattttcctgaaatgtgatggtgtcactctgctgcttaaaacccttcaatgggttcctgttgcccttatgataaaatgaaagtggttggcatgacctgtgagggtccacttgatctggtctttgcctgctttgccagcctcacttggctgctctgtcctttgcactccagtcagctgaatcactcatgtatctgccatgctctctctcttgcctccaggattttggacagattgacctttctgcctggaatgctcttccccattagcccgtgtttctccttcaggtctcagggatcttaaagatcacttcctctagggagtctctctgatactgtccctgtgccccaagatatcccacctgcttccccttgacctttccctgtaatagctggcatcacggtggcatgtgtgtttatgtgtctgtctttctaaccagagctcctatggagcggcacagggcctggcatgtagcaagtgttcaaggaatgttggctgcatgagtgagcatgatgtcctgctcctggaagttgggactttaacctgtctggtcccatgtcctccttccaggtactgtttgcctgtgctgaggccctgcatgcgcatggctatagcagtgaggcctcccgtctcactgtggagcttgcccaggatctgctagccaacccacccgacctcaaggtagagccgccccctgccaaggtgagagacccccttcctctaccttcccctcccccacttacccccaacctgctcccatgccccaccccaagtgagagcatccttctacctccaccaaggtaagtcagaatcatctgcctgtctcctgtgtttcttccctttctagggcaagaagaacaaggtatccacgagccgtcagacctgggtggctaccaacaccctgagcaaggcggccttcctgttgacagtgctaagtgagcgtccagagcaccacaacctggccttccgagttggcatgtttgccttggagctacagaggcctccagcttctaccaaggccttggaggtcagaggctccatctcagccttgtatttcagtctctttagagccttgcaccttgatctctattgacacaccagaggtctgagctccttcctgtgccctcaggtgaagctggcataccaggagtctgaggtggctgccctgctcaagaagatccctctgggtccaagtgagatgagtaccatgcggtgccgggcagaggaacttcgggaggggacactctgtgactatcggcctgtgttgcctctcatgctggccagtttcatctttgacgttctctgtgctccaggtatgatgcctgaccctacagtaagtggggaactggggtaggggtagctttctctaagaaagaccaagagccccaagtttctgaatcacctttaggacccatcaggcagcttcatgggtaggtctgtgatgatgaggattttgggttcccctgtattttttcccatgcatgatacttctgtctgcctgacttaccccaacttttatacagtggtttctcccacaggttcccggcccccaagtcgcaactggaacagcgagacacctggggatgaggagcttggatttgaagcagcagttgctgccttgggtgagtcttgagcatatcaacgagctaagcctggttcaggtcttgaaggacatgagacctgtgccttgttgtgaagggctgtatggtaatgggaaggtcaggatgacatgtgtgagccaactagtgcctgtaagacaggaattcagggcaaaaatgtgtgctatatggctgggcgtggtggcccatgcttgtaatcgcagcgctttgggaggctgaagcaggaggattgtttgagctcaggagttcatgaccagcctgggcaacctagcaagacctcatctctacttaaaaaaaaaaaaaaaaaaaaaaaaaaaattagccaggtgtggtggcacatgccttgtgctgccagctactccagaggctgaagtgggagaattgctttagcctggagattgaggctgcagtgaactgtgattgcaccactgccctctagcctgggcaacagagtgaaaccttgtctcaaacaaagaaaaaaaaaattgtgtgctatgggtattgggtattgtaagggcagcaaaacaaaaatctagagaaaggcctaagggaagtggtagaatatggaatgtgggttaaaagatcagtaggtcctaaaccagcgaacaccatgagtaaatacacaacgcaatcaagttttcatgagaatgaggaggccagcttccctaaaatgataagtacatgctgggtaagcagattggacctggttatgaaggttttgaaaagcacaccagagcttaggctggatataatagtcaacgaagacttctataggtgatgtgggttggaccaagggaaccccttacttcatatgctgatggcttgggaaccctggcctcttacctttgctgtcttgggaattatgactactctcaatccccataaggtcctctttctcgcaggcatgaagacaacagtgagcgaggcagaacatcccctcttatgtgaaggcacacgtcgggagaagggtgacctggcattagcactaatgatcacttacaaggacgaccaggccaagcttaagaaggtaagagactggggctgggtgcggtggctcatgcctgtaatcccagcagtttgggaggcagaggcgggcagatggcttgagcccaggagtttgagacaagcctgggcaacatggcgaaaccccgtctctaccaaaaaatacaaaaaattagcagctgggtgtggtggcacatgcctgtagtcccagctactcgggaggctgaggtgggaggattgcttgaacccagtaggcagaggttgcaatgagctgggttcacgccactgcactccagcctgggtgacagagcaagaccctgtttcaaaaaaaaaaaaaaaaaaaaaaggcaaggtactggggcctttgacaggcagagaaagagagcacattttactacctttctcagggagtttccagtacaatgagaaaagtgctattttaggctgggtgcagtggctcatgcctgtaatctcagcactttgggaagcagaggcgggaggatcgtttgagaccaacctggccaacatagtgagaccctgtctctacaaaaaattagaaaattagccgggcatggtggcgcgcgcctgtagtcccagctactcgggaggctgaggtgggagaattgcttgagcccaggagtttgaggctacagtgagctataatcataccactgcactccagcctgggcaacagagcgagaccctgtctcttaaaaaaaaaagaagaagaagaaaaaaagaaaagtgctcttctgcccataggaggtaagtagggaatcttggggacatctcataaagaataagagaagaccaatggttcttataggagtgcttgggcatggggtggaagaagagaagcagagggcataaagtcattcattcacttatttcagtatttattgactatcagtatattctgccctgtggtgttaatggaggataccaagatatgttggggttaaataagttacaaaaagacatgtaaaccaggaggtcatcctgtggttgtaagtggggaaggctccctgaggatgtagcaattggctgtttcaaggagaaaggaaggtaatagaagtcaggagctaaagggcatcctgtcactgcttctctggaggtcactgcttctgtcttccagatcttagacaaactcttggaccgagagagccagacacataagccacagacgctgagttctttctactcatctagccgcccaaccacagccagccagaggtctccttcaaagcacgggggcccatctgccccaggggccctgcaaccactgacctcaggctctgcagggcctgctcaaccagggagtgtggcaggggctgggccaggccccactgagggcttcacagagaagaatgtgcctggtgaggtgggggcactgggcaggggggatgaatggtgtggacctatgttgaggtcccctttcctgggctcatcccagcgtcctgttttcctcacctagagagttccccacattccccctgtgagggtcttccatctgaggcagctttgaccccaaggccagaagggaaggttcctagccgcttggcacttggcagtcgtggaggctataatggacggggatgggggtccccaggacggcctaagaagaagcacacaggtaggatagcctgtgggctagcatagagggaaggataatcctgaaggttggagtcttaacatctgggactcctgacttctgagactgacttctcttgggggttaggcatggccagcattgacagcagtgcccctgaaacaacatcggatagttcccccaccttaagccggagaccacttcgagggggctgggcccccacctcctggggtcgaggtcaggacagtgacagcattagcagctcttcttcggactccctgggctcctcatcctccagtggaagtcgccgggccagtgccagtggaggagcccgggcgaagactgttgaagttggcaggtcagtgggaagaactccccatcttccctgatctggcccaccctcagagccacacccctagtgcaatccaaccattgtctcccagcatcctcactttccctggtccttcccaacctacccggatgcccatttcaaagaaaccccaacccccgtccctaccccattgccccttcaggtacaagggccgccgccccgagagtcatgcccctcatgtacccaatcagccatcagaggcagctgcacacttctacttcgagctggcgaagacagtgctgatcaaggcagggggcaacagcagcacttccattttcacacatccatcttcctcagggggccaccagggtcctcaccgcaacctgcacctttgcgccttcgagattgggctttatgcccttggcctgcacaactttgtttctcccaactggctctcacgtacttattcttcccacgtttcctggattacaggtaaatcatttgacctgacttgggtatgggagggggattaattggtggggataagacccttatctttgtggggttactgatctgataaaaagacattattctcacaccccagtggtgcccacactaacccaactctgcccttctctcctttcccctaaggccaggccatggagataggcagcgcagccctgactatactggtagaatgctgggatgggcacctgacaccccctgaggttgcatccctggctgacagggcatcacgggcaagagactccaatatggtgagggcggcagcagagctggccctgagctgcctgcctcacgcccatgcattgaaccctaatgagatccagcgggccctggtgcagtgcaaggaacaggtatttctacgggcaatctgggaacctcttctggggcatctgggcagggaggttgggcatgggaaagctaagggcccagctcttgattcccgtatcctggagtttacagatgattgttggtcctctcatggcaacattttacccattaatgtgctttcacacccatctttcctttaccttacaactcaaaggttaggtttatttctattttacagataaggaaatggaggcctacggtttagggaccaagatgatcactcaggatagaaaacttagggaaggcctcatacatctaagacttgaatgggagggggctgttaaattagtttggaactgggactataacctgggtcttgactcattttggtcagtatttactcagtgtgtgaagcactcactgctctgataatggactctaagcattgacactgacctctgatgattccctgggaatgagacagctctgagggagacattggaatctcatctaacaccttccatgtggtaaaggcctttcccccttaacactctgtgcccctctcttccaggacaacctgatgttggagaaggcctgcatggcagtggaagaggcagctaagggtgggggcgtgtaccctgaagtgttgtttgaggttgctcaccagtggttctggctgtatgagcaaactgcaggtggctcatccacagcccgtgaaggggctacaagctgtagtgccagtgggatcagggcaggtggggaagctgggcggggtatgcctgagggtagagggggcccagggactgagccggttacagtggcagcggcagcagtgacagcagcagccacagtggtgcccgtcatatcggtggggtctagtttatacccgggtccaggactggggcatggccactcccctggcctgcacccctacactgctctacagccccacctgccctgtagccctcagtatctcactcacccagctcaccctgcccaccccatgcctcacatgccccggcctgccgtcttccctgtgcccagctctgcatacccacaggtgagaccagtgttctgctggggggtaaggcatgggaaaatactgggaattcatagggggttggagtgggtactctgggagtataattggtcagtcggagagtcctggtgaggtggtgggagtctgggggacccagcccaactaaaataagaaatgacggccgggcatggtggctcatgcctgtaatcccagcactttgagaggccgatgtgggtggatcacttgaggtcaggagttcgagaccagcctggccaacatggggaaaccccgtctctactaaaaattagctgagtgcacgcctgtaatcccagcttcttgggaggctgagatgggaatcacttgaacctgggaggcagaggttgcagtgagccgatatcgtgccactgcactccagcctggaggacagagcgagactctatctcaaaaaaaacatgtcaggatagcagcttgtgggggtgaagcacgacagcaacatcctaatcaagtttggcatcttcccctttcttctccctgcccctagggtgtgcatcctgcattcctaggggctcagtacccttattcagtgactcctccctcacttgctgccactgctgtgtctttccccgttccttccatggcacccatcacagtacatccctaccacacagagccagggcttccactgcccaccagtgtggcctgtgagttgtggggccagggaacaggtgaatggaggggaggcacactgggcaggggaggtggggagggaatgttctttgtctctctttgggctctgagttcctcacatggctctcaccccacttagtgagcagtgtccatccagcatccacgtttccagccatccaaggtgcctcactgcctgccctgaccacacagcccagccctctggtgagcggaggttttccaccgcccgaggaggagacacacagtcagccagtcaatccccacagcctgcaccacctgcatgctgcctaccgtgtcggtgagaggacatccctttctgtgctcctacctgcagttgtgccagtggctcttcagaggacccttcctctagctcttcatttgtttactgtggggtcaggtgacaggttggggtaaagggtgaagaggatacaccgtaccatgtgcccacccttatctatctcccaggaatgctggcactggagatgctgggtcgccgggcacacaacgatcaccccaacaacttctcccgctcccccccctacactgatgatgtcaaatggttgctggggctggcagcaaagctgggtaacacctcccctccctaggaccattgccccccccccacctgctctccccaccttccttatcccagacctccttcctagctcttgctcagagttgaggccttggtcgggtatgtgtgcgtgcgcggggggcggagggttacctcagctcctggggtggagggaggctctctgccaggccagagctgagatctgtaagttgggtccctagggcagaggtggccacccccgtctcatgcccctccccctgccccccaggagtgaactacgtgcaccagttctgtgtgggggcagccaagggggtgctgagcccgtttgtgctgcaggagatcgtcatggagacgctgcagcggctgagtcccgctcatgcccacaaccacctgcgtgccccggccttccaccaactggtgcagcgctgccagcaggcatacatgcaggtgacaacctagaattatggagcagggtggagcacttcctgggtggtcttggaccagagggaggcagggcctgtttctgtgctttgtactaaggctcatcctgcacacatcctcctccagtacatccaccaccgcttgattcacctgactcctgcggactacgacgactttgtgaatgcgatccggagtgcccgcagcgccttctgcctgacgcccatgggcatgatgcagttcaacgacatcctacagaacctcaagcgcagcaaacagaccaaggagctgtggcagcgggtctcactcgagatggccaccttctccccctgagtctttcacccttagggtcctatacagggacccaggcctgtggctatgggggcccctcacacagggggagtgaaacttggctggacagatcatcctcactcagttccctggtagcacagactgacagctgctcttgggctatagcttggggccaagatgtctcacaccctagaagcctagggctgggggagacagccctgtctgggagggggcgttgggtggcctctggtatttatttggcatttataaatatataaactccttttttactctagtcga

SEQ ID NO: 864 - DNA, 207 bp, Homo sapiens
ccttgagtggtaactttatcttagtccaggtgattccagttgcagcagtagctaggtgccctgcgataactctctccccttgagggtttccagtgtgggaagttgtcatttaggcgcgccaaaagtggtctggcctctcgtgcttcttgagatcccttccgggctctggtctatcttgtctccttagctgggggcctacagtcatct

SEQ ID NO: 865 - DNA, 2124 bp, Homo sapiens
aaacagaaaaataaggatgtttattaaggacatttctagcccacagctagggctcatactcggctctatgagccactgtccgacctcatccccattcaatgtgaatgacattagggaggccgggccacaggtagatcccactgcctggctaaaggggccatagcaaggggtccctcccatgcaaggggtctctcccatagccaggtatagaatagatacactgctgcggatgaagagggaaatctcattggactaatacattcccctacaccctgcctggaccctctcattcctccccacctcccaagatgatgggtcaaaggtacctagcactattatgtggggtaccaaaggaagcccctttatttgtcccagaactgtgggaaaaggatacccttcccttctcagccatctcaggcctgggggctactgaggtagagggggaggggccaggccactctaatcccccttgtgggccctgctctggacctgccccttagggaagcagggggcattttgctggtatgggaggctgggacatcagcccagactggaatgctgcagttcttcccgaagccacgagggcactggctgtccaagccggctcagcagcttcgacaactccaaattatggttccggaaaaaatccgtaaggaaaagacgggactgacaggagaaaatgaaggcagaaatggtaagaagtgggacacagaatcagatcctggaagtggagagggattcccctgcccctggctttacttacctcagtgtccatatctggatacctccggcctttgctccggcctagacagcgagtcttaccaccttcaagtccctggcaccaaaatcccttatcatcatcaaacctgctcaacaggaagaggccatgaggtggcagggaaaagagaaactcaagttccataaatgcacaatgcccttccctgcccacagggacatgtctctccttgtgagacagagtaaatctatgtctctaacagacatggtcaacctgcttccccatttcccatacagtactcctcccctgggtcatgctctcccacctgagggtccgtgtgtagttcagaaagggtgtgatacccaggaacttctggatgctctccattgaggctgctgggttggtacgcagctcttgcccatccacaatcagcaactaaaaggacagggatgtggttccctctatattcctaagaagcctctgggctgaagggaagaagaggggaaggggaaccccactgagggctcttgtggggattatacctgtccagaggggtagtaagtcagccagcgttgtagatgggtagaatagtagccagggacaagacagcggttctgcagggagcgtagtgccagaggggtctgggaggaggctgaaatcacctgatagaaggtatagttcagagcaactgggtctccatgggctcgctgatgctgaaggacaaagagaaggaaggtgaaggactggtgatttgacagtattctgcccttacgcttggtctggagacagacagcacagcacgggtacccgtccccaaggcactagttaagtttctcaaacctcactcctttctccctctctagcagtcactgtcccctcccccctccccccaacctttagcctgtgtgtccctagcttcaggcagacctggtaccaggagtaggccctgtcagcagggttggtgagcactgtgatgatcttggctcgtggcaggagggcagccccccgccgtggtacaacttcagagtcaaagtaggtggcacttttttcaaataggaaatcagtgctggcattggaaggaacagggaagaaatccatgtacctaggaagtagcacagaagagagagaagcagaaaaatatgcagagtgaagtggccagaagtctgtgctgagggaagctggaatggggtattttgggggaagggagtgttcctctgagaaacattcaaatggggcccagtctcaccagtcaatacccttgtggtaattagggctgttgaagaactgaatctcctcaaatgtgctggggctagggaagctgctagttacagctgggtgcaggctcaggaagaagtgaatagctgtagtccctaaatgggagagaaaga

SEQ ID NO: 866 - DNA, 207 bp, Homo sapiens; identical to SEQ ID NO: 864

SEQ ID NO: 867 - DNA, 2971 bp, Homo sapiens
aaacagaaaaataaggatgtttattaaggacatttctagcccacagctagggctcatactcggctctatgagccactgtccgacctcatccccattcaatgtgaatgacattagggaggccgggccacaggtagatcccactgcctggctaaaggggccatagcaaggggtccctcccatgcaaggggtctctcccatagccaggtatagaatagatacactgctgcggatgaagagggaaatctcattggactaatacattcccctacaccctgcctggaccctctcattcctccccacctcccaagatgatgggtcaaaggtacctagcactattatgtggggtaccaaaggaagcccctttatttgtcccagaactgtgggaaaaggatacccttcccttctcagccatctcaggcctgggggctactgaggtagagggggaggggccaggccactctaatcccccttgtgggccctgctctggacctgccccttagggaagcagggggcattttgctggtatgggaggctgggacatcagcccagactggaatgctgcagttcttcccgaagccacgagggcactggctgtccaagccggctcagcagcttcgacaactccaaattatggttccggaaaaaatccgtaaggaaaagacgggactgacaggagaaaatgaaggcagaaatggtaagaagtgggacacagaatcagatcctggaagtggagagggattcccctgcccctggctttacttacctcagtgtccatatctggatacctccggcctttgctccggcctagacagcgagtcttaccaccttcaagtccctggcaccaaaatcccttatcatcatcaaacctgctcaacaggaagaggccatgaggtggcagggaaaagagaaactcaagttccataaatgcacaatgcccttccctgcccacagggacatgtctctccttgtgagacagagtaaatctatgtctctaacagacatggtcaacctgcttccccatttcccatacagtactcctcccctgggtcatgctctcccacctgagggtccgtgtgtagttcagaaagggtgtgatacccaggaacttctggatgctctccattgaggctgctgggttggtacgcagctcttgcccatccacaatcagcaactaaaaggacagggatgtggttccctctatattcctaagaagcctctgggctgaagggaagaagaggggaaggggaaccccactgagggctcttgtggggattatacctgtccagaggggtagtaagtcagccagcgttgtagatgggtagaatagtagccagggacaagacagcggttctgcagggagcgtagtgccagaggggtctgggaggaggctgaaatcacctgatagaaggtatagttcagagcaactgggtctccatgggctcgctgatgctgaaggacaaagagaaggaaggtgaaggactggtgatttgacagtattctgcccttacgcttggtctggagacagacagcacagcacgggtacccgtccccaaggcactagttaagtttctcaaacctcactcctttctccctctctagcagtcactgtcccctcccccctccccccaacctttagcctgtgtgtccctagcttcaggcagacctggtaccaggagtaggccctgtcagcagggttggtgagcactgtgatgatcttggctcgtggcaggagggcagccccccgccgtggtacaacttcagagtcaaagtaggtggcacttttttcaaataggaaatcagtgctggcattggaaggaacagggaagaaatccatgtacctaggaagtagcacagaagagagagaagcagaaaaatatgcagagtgaagtggccagaagtctgtgctgagggaagctggaatggggtattttgggggaagggagtgttcctctgagaaacattcaaatggggcccagtctcaccagtcaatacccttgtggtaattagggctgttgaagaactgaatctcctcaaatgtgctggggctagggaagctgctagttacagctgggtgcaggctcaggaagaagtgaatagctgtagtccctaaatgggagagaaagaccagcttcaggcagccattgtgggagggaagccagctcaacagcataagcttgaaggaagtgaaaaaataaccactctgggtaggaaaatcccctatggccaaactacaatgataggaggcaagtctgagagaggcccagggaagggctaaaacagtggttctctgctttaactgtgcaccagaatgacttgtgatcttgtaaaaacaccacagatgattctgatatacaaccagggttaggaatcactgcctcaagagactggatcaatgaggggtgggtataaaaggagttcctttttttctctcttaaaaattcaaattaaggccgggtgcggtggctcatgcctgtaatcccagcactttgggaggccaaggcaggcggatcacttgaggtcaagagttcgagaccagcctggccaacatggtgaaaccccgtctctactaaaaatacaaaaattagccaggtgtggtggcacctgcctgtaatcccagctactagggaagctgagcagaattgcctgaacctgggaggtggaggttgtagtgagctgagatcgtgccactgcgctccagcctgggcaaagaagtgagactcttatctcaaaaaaaaaaaaattattaaaattaaaaatacttttttcactcctgtgattacctggagagagaagagagttccttgacaaaaggatcctttgggtttaaggcagggcaagagaagttagctaaggatacttcacctgttttctggggtcccacaatgaggaacttcgggagacgatcacaggttttctccttggaccagatatctttgtgcctcttgtcatcacagggattctgaagccaggg

SEQ ID NO: 868 - DNA, 21501 bp, Homo sapiens
gaggctctggtcataatggcgaccacacttttattgaatatctgttgtgtactgtccaggtcttcacatttgtcacctcatttaattctcatgttaagcctgagtggaaagcattatgaagcccatttgaggaaagagaagagtgaagttcagaggcaaaagtcatctgtccagggtcctttgccaaatgacagctggcatggaaccctcctaaggctgattcctctatcctccttctcctaacagcacttcaggggcaaccttctcctctatcttttctccactcaccatcaaagaagccctcaatttcccaggattctaggacatttccctaaggtgggggtggtgggacaggtagtaagactgatgccttttaactttccaagacctttctttatttcctgagatgaataaataagtggcaatggggtgtggggatgtggtgaacacagaacaggaactggcagcatgcagctggcaggagggagctgtgatggccccacccctgtgaggaccacctaatcctaagcaggggccaaagctctagcagccaccattaaggaaaaacttttgaaattcacacattgtgaagcctgccagtccccgccaggtgaagagctcatggtatccaccttcagggctactttttaccccaggggccttgtctgcccgggcctgggtacctgggctgctctgtaaggcaggtaggggtgcttaccccactctcaaaaataaaccaagctgtcctgagtgtccagcaggagggcagcccaagctctgggggcagcgtgggtgggaggaggtcctacaggtggtggccgcgattatctgcccttgatgaagccctccagcacacggtcactgcgctctgacaaccagtagccagtcatggccgccacagccccaatgaagatggcggtgaacaccaagtcgcccttagcagccagcgtggccagtgcacagatgatgatgccaaagaacatctgctgcagcaccaccaactcgtcttctgtcatctctgagaagaagcctgctgactctgcagaggagcaagagatgcagcctggcactcgtatccctgttcctggtagttcttggagtctccccagaactcccacacacctgatcatcatggccaccaggcctgcccagcaagccaggcacactacatttactgctcaaaaccaccctgcaaggggcagttaccatccctgtctcactaaatgggaaagtgaggctcagagaggtaaaggggttggacttgccaaggccatgtggtggacaagttgggggcagagcatttattacgtgtatgagtctcgttccacggtcagactgtctggattgggatcccagctttgcgacttgcttgccatatagccctgggaaagtagcttcatctctctgcatcttcatttttacatatgtagagtggggatgagaacccaacttccagcgtcgggttgtttcaggggttaaatcagttaagatggggaatgcacctagaacagcatctgacacagtaattgctggggaaatggtccctgccatcatcgttgtgattaccctgcatctcaccacacccccggcctaggacagctctcagcaggccagggcaaacactggtcccattggatagatgaggaaacaggttaaggaggcagactgatttgatgccaggtctgattccctttgtaccctggaaggtataaggctgctgagagccaacctggagatcagatgtagagcccggtctcagtgcagcctccagggggctgggtggcagtagggatggggcagggcctggagctgccactgctacctggggaaggggcttgcctgccttctctttgaatgaggacctcccctctcccgccccagggctcacctgggatctgctccttcacacagatgccttccatctgcttgtagccctcggcacagatgcagcgataaccgccctcggtgttttcacactgcttgttctctcccggacacacctctgtctcacactcatccacatcttgaggggagggaggggtcagagtcctgctagggccccccacccagcaccctgactccatcttgtccatctctcaacactcccctctgcccttgcccaggcaacattccacccttccttcccccacctgcccatattccagcctcttcaccattcatgctgggtgaggcactcccaggtgcctgtgtcccatcagcaggagactcaccgagacacttggagcccacctgctgatagccagggctacacttcttacagcgacctggccctgcccccatgcagcctaggcaggccttggcacagtctggagagaggagagaaagatgagggtgagatgtgcacctaggcccaggggagccacgctccagaagcggaggcctgggggtgctctgaagcctgagaaggggaaggtttggagggacaggtgtggagcagctcttcctccactcctcacgtcccctcctctgcagaagtagacactgacctcggcactcataggagccctcagtgttcacgcagaattggtcagctccacagttggctccctctgtgccacactcatcaatgtctgcagagaggtgagcagggtgagaatttcaatccctatttagtagggaagctgaagccagagccgttggggaatggtcttgcctgggattaaatggtatggcagagactgcaagctgtctaccaacacagaagcagactagctggacttcaggctgcccagccagagaccacatttgccaacctgtcttgaagctaagtgtgtccctgtgattgagttctggccaacaggatgtaaacaggagtgatgagctccaccgttagcttggtcttaaaacaatgcttggactcctcaatgcactttctttcccttctcccttcctgagtgctggcatgtgggacacagagatgcccaggactcagcttcaaccatgcagacaacgcccaaggggatgattgtgcagtaagttacaggaataatctgggtactggaatgattatgactagcagagctcccctgccagcctggactactcactttgggactgtaatatgataaaaaaaaataaacctctaccctctagattcttttttttttttttgagatggagtttcgctcttgtcacccaggctagagtgcaatggtgtgatcttggctcactgcaacctctgcctcctggattcaagcgactctcctgcctctgcctcccgagtagctgggattacaggcacctgccaccatgcctggctaaatttttgtatttttagtacagacagggttttgccatgttggccaggctggtctcgaactcctgacctcaggtgatccaccccacttcagcctctcaaagtgctgggattagaggcgtgagtgagctaccacacccagccaacctctatactctttaagccacagtcttttggggatttttgttacagcagcttagcctttactttagtctatataagtggctaggctgggaccaaaccaagtcttgaacccaggtttcctgaccccaagttcagtgtcctcattctcctagccaacccttcctcatttttttttttttttttttttttttttgagatggagtctccctctgttgcccagactggagtgcagtggtgcgatctcggctcactgcaagctccgcctcccaggttcatgcccttctcctgcctcagcctcctgagtagctgggactacaggcacccgccaccacgcccagctaattttttgtatttttagttgagacagggtttcaccatgttagccaggatggtctcgatctcctgatctcatgatctgcccgccttggcctcccaaagtgctgggattacaggcgtgagccaccgcgcccagccccttcctcaatttttaggacttggccaaagtaacgcctcctccaagaagcctttcctgattccccatcaccacttccactgaactagatcagaggcatctctcactgtacacagggactatactacacagtacctgtgtactggactgtaagtatctggttacttttctgccttcccagccaggttgagatctccatgaaggtggagactaggctagtctagcccaggcttgtgttgagagaataaaggaccaagcccaggcccctgaccatcttcccagacctagctagggccccacttacctacacacttgaggtgatgcagggcccagcccttcttgcattgcaaacagtttgattcctcaggtcctgagcatcgggcacaggggccaaaacaagctgggtggaatgggggcagcatgaggatgggcaggcaggtgccccatctgcccctgcccagtgccacaccttttggctacctacccgaacataccagatggctggcgttgcgttctgcctcaaagtagccaaggccacactggccacaggcctcacccccgtagccggcttggcagtcacagtgcccgctgccccctcgtgtcccttctccttcacactgcccgtagccaccgcagggcctctctgttcccccaggacaggctgtgggaagacaccaaaccaggtgaggtcatctatacaaccttgatatacaagataatattttctccctctccctctccctctcccttgccttccctccctccccccctcccctccccctccccctttccctctccctctccccatggcctccctctccctctccccatggtctccctctccctctctttacacggtctccctctgatgccaagctgaagctggactgtactgctgccatctcggctcactgcaacctccctgcctgattctcctgcctcaacctgccgagtgcctgcgattgcaggcgcgcgccaccacgcctgactggttttcgtatttttttggtggagacggggtttcgctgtgttggccgggccggtctccagctcctaaacgcgagtgatccgccagcctcggcctcccgaggtgccgggattgcagacggagtctcgttcactcagtgctcaatggtgcccaggctggagtgcagtggcgtgatctcggctcgctacaacctccacctcccagccgcctgccttggcctcccaaagtgccgagattgcagcctctgcccggccaccaccccgtctgggaagtgaggagcgtctctgcctggcggcccatcgtctgggatatgaggagcctctctgccaggctgcccagtctggaaagtgaggagcgtctctgcccggccgccatcccatctaggaagtgaggagcgtctctgcccggccgcgaccccgtctgggaggtgaggagcgtctctgcccggccgccctgtctgagaagtgaggagcccctccgcccggcagccgccccgtctgggaagtgagaagtgtctccgccgggcagccagcccgtccgggagggaggtgagggggtcagccccccgcccggccagccgccccgtccgggaggtgaggggcgcctctgcccggctgcccctactgggaagtgaggagcccctctgcccggccaccaccccgtctgggaggtgtacccaacagctcattgagaacgggccaggatgacaatggcggttttgtggaatagaaaagggggaaaggtggggaaaacactgagaaatcggatggttgctgtgtctgtgtagaaagaagtagacacgggagacttttcattttgttctgtactaagaaaaattcttctgccttgggatcctgttgatctatgaccttatccccaaccctgtgctctctgaaacatgtgctgtgtccactcagggttaaatggattaagggcggtgcaagatgtgctttgttaaacagatgcttgaaggcagcatgctggttgagagtcatcaccactccttgatctcaagtacccagggacacaaacactgcggaaggccgcagggtcctctgcctaggaaaaccagagacctttgttcacttgtttatctgctgaccttccctccactattgtcctatgaccctgccaaatccccctctgggagaaacacccaagaatgatcaataaaaaagacaaaaaaacaaaaaaaacaagataatattttctgctctgcatatcagtaaacatttttggagaagaaaattaattttaatgacataatattttgtcataaaactgacatttacttaaccaatttcctcttgtggaacaattagattttacagaccttttatttatttatttatttatttatttatttatttatttatttatttttagtgacagggtctcgctctgtttcccaggcaatgacatgatcatagctcactgcagcttcgaactcctgggctcaagcaatcctcccacctcagcctaggggaacaacaggctgcactaccatgccccactattttttttttaagagacagggtcttgctctactacccaggctggtctctcaaactcctggcctcaagtgatcctcctgcctcagcctcccaaagtgctgggtttacaggtacgagccactggaccaaatattttcttttttttttttgagacagagtctcgctctgtcgcccaggctggagtgcagtggcatgatctcggctcactgcaagctccgcctgccgggttcatgccattcttctgcctcagcctccagagtagctgggactagaggcgcccgccaccatgcccggctaattttttgtattttttagtagagacggtgtttcaccatgatagccacgatggtctcgatctcctgacctcatgatccacccaccgcagcctcccaaagtgttgggattacaggtgtgagccaccgcgcccagccaatattttcttttacaaagactgaatttgccatctttgtagctagctctttatctgtagcttcaggaaagactgctctaaaagaggctggtagtaagttcagctcttgtgccaggactgtgtgtgaggatggatggcgatcatggaggctccaggtcagcacccgcccctccccaggaaggtaccatagtccgatctggcatgggaaatgaaggggctgggaagtctatcatttctttagtacatgatgataactatactgcatatgactcagtctagcccctgtgctttctccaagcctttccccactgatttgcccatctccccagccctgtcaggcaggcaagaactgaggtccagagaagtttatctgagtagcctgagttcacacagcgaactagggacagagccaggactggatccctggactcggtggtcccctcccatccccaagagcaacttaaaaactcacgaaggcaggagggcccgaaggtgcctgcggggcagcagagcttcagggaatctgagcacagccactggaagaggtccggggcctcctgctgcctgaggcaggggcagggtggagggaggtggggaggaggtgctgagatagtgtcataagtgctgttcccattcccccatgcctgaatctgtgattcaacccagcttggacataagacccaaaaggccatctgaccaatgccctttccccatttggcagaagggtaaactgaggctcaaagtggagcgcaagtcccccggcaagttcttagcagacctgggtttggaaggagcacaaccaggacatgggccccagcatgcacccccctgcttctcggccaaatcaggccttatcaccaggcctcacctgtgacccacttccagggaaggccctttgccactcacttgtgaaaccaccagctctccaccagctcctcactcagctccagcaggcggtggcactcgaagtctgacttgctgcacacaccctccagcacctctaccaggcgggtctcactgatcggacagggcagggctggtgggaaacatgccccaccccacccaccaccctcctcaagtctctctccacccttcctcgtgcggtgaaaatatcaaaggagaggccatgaggtataatggaaggggtcatggttctgggaagcagagagacctgggttcaaatctagtggtagatctagtgggcaagtcacttaacctctctgaacctctttgttttgtcatctgtaaaatggggatgacaataccttccctgcaggtttgttgtaacatacatcagttcctgcatctgagcaatggaatataatacccttgctgggtagatatggctaaaaatacatcctataacaagtgttggcagggatgtggagaaattagaatcctcccacactgcaggtgggaatacaaaatggcatcaccactgtggaaaagcagttcctcaataagtaaaacatggaattgccataggacctgccaattccactactggatatagacccaaaagaatggaaaacaggtgttcaaacgaaaacttgtagacaatgttcatagcagcactattcacaacagccaaaaggtagaaacaatgcagatgtccatcaactgatgcatggttaaacaaaatgtggtacagccaaatgagaatattattcagccataaaaaggaataagtattgatatatgctacggtatgggtgaaccttgaaaacattatgctaagtgaaactagccagacacaaaaggccacatattttatgattccaatgaaatcagcaaatccataatttctgcttgactaacacaaattagtgattgccaagagccgagggaaggggagaatagggagtggctgtgtaataggtataggattttttgggggggtaatgaaaatgttctggaactacatagtggtgatggttacacaacattgtaaatattattaaatgtctttaatgggaaattttttatgtgtattttaccacaaatatatacatatatatatatatatacgcatatatatacgcacatatatatacgcagacatatatgcacatatatatacacacacatatatatatacacacacacatatatatacacacatatataaatatttgatgtcttatatcctgtatttaaagggtctggcacagtgcctggcatataggaggtgatttaaaaaagcaagcaacgcaggagccattacaaagctggaagtgcctctggggttgtcttagccaatcccctcattcctgaatgaggaaactcaggcccggcgaaggaaaagagaaaatgaccaatgttacataataacaaaacctttatttctagtgggcatcccagttaagccttttccacacttctatgaaataggcaaaccaggtattaatatccccattttacaggtgaagaaactgtggctctgagaggttaagaaccgacaaccaggtctaactctgagcctttgctgactcctcttccatctgactttgaaaagctggagggctcagggctcgcctttctgtatccttcccatgcctttctttacatactgactatataaatggctttctgtattacatatattgactatataatggctttctgtatccttcccatggctttctttacatactgactatataatgacaactctcaaattcctgtttccaattcctactcttttctgaattccagatttgtatggagtctacctggatgtctaatggacatttcagcccaatacgttcaaagaacaccacatcccacccctcccctaaaccttctcggtttcgcatctcaccatcttagaaaacagctgcactactcacccagttgctcaggcccaaaatctagtaagcatcttttattctactgtttctctatacccataatgaatctatcaccaggtcctattgttctctctgcaaaatatacccagactgtgacctcttcatcatgtcctccactagataccacactagcttgtgttgcctttgtacctagatgatgcacttgcctcccaaactggtctccctgcttcctccgcccttgccccttacaatccgtttgctacatagcagtgtgagtaatctttaaaggtgtagagaagacagtatcactttttctgctcatagccttccaagagcttcccattacactccaaaaaaaatctaaactcttttctgtagccctcgaggcttaagcctttgccttcaccttctagcactctccccttggctcactccactccagccacttctcaaatacaccaagctcagtcccatcctctgcccaattccctccctgtcacatagctcgcttcttcacttcctgtctctctgttcaaatgccaaaccttgaacaccttgcctcccaccgtcctgcagtctaccgtgcttcactgtttgttcttcatctgacataatattattcacttactcattcactgcttgtcttctctactagaatgtgagctccaggaagggggcattttgcttgccttgtttactgctatactatagatgttcagtgctatttgttgaatgaataagtgctccccaagagttcctagccctacaccagcagagcagagatttggcggggaggggaatatacaccccttcccccagcagccccttacctgtctttgtatttggacaaattctcttcctcccaggcagtgtttccacctccaaagttgtcccggatggttctctccaggccctggaaacagaaaattagtaatagctaagtacagtgcctggcacatgctagcacttcactgttctactgactaggaaactgaggcacagaaaggcaacctgcctagggccatacaactagtaagagaccaagatgaaacttaaatccacgcagatttgcatcccagagttccccactctaaatcgctgtgttcccctctaacgaggctgccggtgcacccaccttgttaaagctgtcaaccagtccccggcaggtatgacacggatggggctgaggcgggggagaagactggggaggtggagagggctggagccagataggtcctgggaggttgaggaagaggctgaggccccagagcacagctgggactaggcccttcgggggccatggggccatctttacccaggctggggacctgcagatagagggcgtggagaggcttcactgaaggagtcaggccccacgcgagaaagaaaaaggtctgttctaaggtgccgtggcgctgggatctgcgttattacaagcaaaagaggccaaactgggtattgcaggggctgtggggatgggtggggaaaggcgcataagatgcaattccagaagagaaataagttatcctcgctagcatggggtggagaggaaagtggcctcgctccttgacaagggggcagaagtcagcctcttgtctgagggtctgataaagaatattaggggccggatccgcagaattagggagaagagatcagattccaagtactgaaggagaggaggccagaggggttgtcttgggggaggtgtccggaaccccgggcttggagggaggagcccggatccggatatgaagggaagggatcagattcagggcctcgcagaagggcaaaggcacggcccacgagccggcagagaaggatccagaccctcgtaggccacggagaaggaagaagcgaccgccccagcccgcgggcgccgtgggccgtctcctcaccgcgtcgctgccacagcctgcgtaaaacgcacaacccccacccgcgccgcagtccagggggcggagcttgccgcccagccaatggcgacgggccatgtgccattacgtcaccccacgccagccaaccagaggcggcaccgagctgcacctgtccgggctttaaagggccgcggggctagggaacgacgtttgccagccccgccactgaaacggagacgcgtgtgggccacatgggtagaaaaacagcgtctgcctttatttaagtcccgtcccccgccccaggtcccgcccctggtcccaccccgcgtcccggcgcgggagtccccgggggatggaagtagctatccagggctggctgaagggcccgggacacttgctccgctctctcttggagccgcccggaacgcggggcgcgaggctgctgcagggcccccaggaagtctggcagttgggagggcagtgtgaagacgggcacggtgcggaaaagggcgggtacggcgtccgggtggagcagcctgtcgaagcaggcccccacgtagctgccgggcgcccggccctgcaagaagtcgggcagcacgcagctgagcgaggcgcggaaggcgtcgtgcgggccgtgcgccccgggcccggacaccccatcctgtagccactcgctgcacagcgccaccgcaccgggagagaagagcaagaccaccacgccgccctcctgcagggtctggcgccgctgcgcgtgaaaccaagccacgggcccctgcgcgctcagttcacgacggctccacaggtctacggccacgcgcagcggcagctggcacagggccgacgccagggcgcccaccaggcgctcgaaacccgagtcatcggctgagtagaggagcagagccgcgcggcccctggcggccgctgccggagaaaacagatggggagggaagaggtgagctggcacaggcctggctccccgggggcggccctccgcccagcgcttgctcccactcaccccccgagcggacgtcctgtttcaagagcctcagccaccctgttaggggagaggggcggaggcagccagtgagctcggccgccgctttccctcggagaactcccacagccactctggtcctcccccaggggaatggggagccgggaagcgctcacctttcgcgtgatcctttttgagaaggaggatgagggaaagcgcagcggcaaagagtaggcaggccagccacacgagggcccagcgcttgtggatgtctgggagacccagagaagaagagttagaaacttaccctccacagagaagaaaaactgagacttaacagaaatgaattgggccgggtgcggtggctcatgcctttatataatcccagcacttcgggaggccgaggcgggcagatcacgaggtcaggacatcaagaccatcctggctaacacggtgaaaccccgtctctactaaaaatacaaaaaattagccgggcgtggtggcacacgcctgtaatcccagctactcgggaggctgaggcaagagaatcgcttgaactcgggaggcagaggttgcagtgagccgagatcgcgccattgcactccagcctgggcgacagggtgagactcctctcaaaacaaaacaaaacaaaacaaaaaacgaagaaatgatttgcccagagtccacagcacagtgtcagagccagtggatgaatatagctccatctgtttaggggtctttgaataagtaatgtcaccctctgcctcagttttctcctctgtaaagttgtacctatgtcatagggttggtgtgaggactaaatatattaatacatataaagcttaacacaatgtgttaatacatacttaacacaatgccgagcatcttaagtgctaaaatgtcagctgtttttctcccctaagctagggttgctgggcccttgatcttgctgtcctgggtgtctgcaactacctggtgtccctgccctgtctttttttttttttttttacctccaattgatttgccttgaattgattcatgacagcctcagagatcttttaaaaatataaatttgggccaggtgcggtgactcacgactataatcccagcactttgggaggccgacgcgggcggatcacgaggtcaggagttcaagaccagcctggccaagatggtgaaaccccatctctactaaaaatacaaaaattagcagggcatggtggcaggcgcctattaatcccagctacccgggaggctgaggtagagaattgcttgaacccgggaggcagaggttgcagttagccgagatcgcgccattgcactccagcctgggcaacagagtgagactctgcctcaaaaataaataaaaaaataagtgtatatatatatatatatgtgtgtgtgaaatatataaaaatttgatcgtagctcctgctgctctcaacataagatccaaatcccctacatgtctcctgcatctttatctcatgacagaaacctgcctgtccaagaccctgtatctctacccccttcccctagctcagtcttcagagttttgctggaaccttccccctgagcccctcacccctcaccccacccaggtcaggtccacattgtatgcatttacagcactgaacacttggtggtgcttcagtagctcccactttaaatgtaagtgactggctcatgtcttgctagtcttctaggggtggggcgggggcaaggatttatatttttggtgttcctgcgatccctgcaagctctcatcattttttgagtgaatgaaggaatgaccctctgtttatctgatctcagggaaggacaaggccattgcatgtgctgtgcccaagagtggtccctgtcaagatccccactcctggtacagaaaggaaaggcagttcttacaatactcacatttgtccatggggcaggcccatagcgctcccaagtcatcgtcccatagctgtaagatacaaacagaaccaaatccagggcaccagccaggtgttccaatattcaccaagctctggtggcctgatctccaaatttccagcatcaactatgcatatctcccggctaaggttcctgcagctgctctgcctttgtgctgtgcccactgactagggtatgacttcttccataccaaatctggcttataggaagaaattcttcccggaagctctccctggaacccaaaacttagcacctgtaggtgtggttatctgtttatgggtgtctagccaacagtgtgctccttggggataggaactgtgcttcttctactcttaactttcccagggctgaacataaaataagcctaaatagacagtaggtgagtgctagttttaggcctgttgcccctaggcattgaggtggggcccttcttccaccagctcacctgcagacactggcctgactgcaggtcttgtagtaagtactctccaaggcgagctgccctctgccaagccaaaggatgggggcactgttacctggaggtagcacccttagggcagcacctaccaggctacagctgggtagaatgaggtagaggggactgggagactttggtgatgccgctgaatatggccctggtctgagtcaccccccatgttcccagagaccggcacagggtggatggagtgaaaatttgaggccagatgtgagatgcatttggagagatctgtggaggagggtcgcccagtcctaaccgtggaggctttgctgggtagtgaagtacagccactgggttccaaggcacagagggatctgttgtcctgggggcctcgtgtctccaacagtagcacatcgtctttgagaggccccagggagtctggaaggggtgagaggccactctgaccaagacccatccttgctgggattggccacttgcctgcctcccatgccctgaccttcacccctaggaggtggccctgccccagctgcccccaggcccaactcaccagcccacaagcactcctgcagctgcagcttctccgagctgttcacctgctgggaagagaccatggttagggccactaagaaaagcaaaagccaaaggcagaaagaccagaatggggcaggcaacagaaggcctgttgggttgggaatctgcactcaatctgacctgaggcagatgtggattcaaggctgggtgattaggaatcactacatctttctctgccccagccttgtgagatcatctgtataaagcgtcttctgaccctaaagctgtttttatgtcttacggagcatggttcccctctcatctaaccttctcaaagagattcctttctcacatgaccaccctgctaaaaattgcaaccccagtcccaccttatccctttcccatggtatttgtatgcaattttaagatactatatgatttatttacaatgtctgttgcctgcctttctccattacaatataagttctatgagggtagagatgttagggtctatcacaagtgcctaaaacagtgacttgtgctgctcaaaaaatcttgaatgagtgaattttttttttttttgagacggagtttcactctgtcgcccagtctcactctgtcacccaggctggagtgcagtggcgccctctcagctcactgcaagctcagcctcccaggttcacgccattctcctgccccagccttcctagtagctgggactacaggtgcccaccaccacgaccggctaattttttgtatttttagtagagatggggtttcaccatgttagccaggatggtcttgatgtcctgacctcgtgatctgccctcctcggcctcccaaagtgctgggattacaggcgtgagccaccgcgcctggccggatgagtgaatgttcttataatcaccctttgaaactgtagagcaacccattctacaggtatggaaatagaataaggatagcaataataaaagtggctacatttatggagcatttagtctgtaccgattcctaaggggaagcacttctcttatttcattgtcacaaccactccatgaggtagttactgtattatcatctgcattaaacagatgaggaaactgacgttcagagaggtgaagtgagttgcccagggtcccgcgcactactaaagtaggcagtggaactcccatagaggaagctggcaaccactatgctttagcggcccaagaactaagacccccttggctggggggtctgcccaggtccagcctccagcccagcactatgcacccctttctgacctgaacacagaggttagggtggcctttcagcaatgggaactcgagaaccttctgtggaaagagaggaatgggtgggatcacaaaaggggacccccggttccccactctcccctcaccacgggaggtgccctctgcttcacttacgtccacagtgacgttctcccaggaaagcggtgggaccagtggctggcaggggtccccacccggagcccgccagcacagtgccgcttctgcgggcagcgagcacggtgcgtccagcagccagctctgcagggtcagcagtcgcagtcgggcggcttgccagaggttctggtgtgcgcgggggtctgcaaggaaagggcacagtcaccgcaggccaggtacccatcgctcgcaacaccccaaccccagccccaggccggtcggctcaccctccctgaaggggcagatgttcgtcctaacggagtcaggttccagaggccacacctggaaaggaaatgggggtctgctcaggtcccctccatgggcatgtgcctggccctctgctggacagtggggatgcactcattcagcaggtatttcacaaacacttgctgggtcttcctgccttttacaaaacctggaggtgctcacatctattcttccagcaaacataatgctgggcactggcaacatcttcattaacaaacttttttttttttttgagatagagtctcgctctgtcgcccaggctggagtgcagtggtgcaatcttggctcactacaacctccacctcccaggttcaagcgattctcccatctcagtctcctgaggagctgcgattacaggaacatgccacaacggccggctaactggttaatttttgtatttttagtagagatggggtttcaccacattgatcaggctggtctcgaactcctgacctcaagtgatccacccgtctcagcctcccaaagtgttgggattacaagcgtgagccaccgcgcctggcccattcaacagacttttaatgagtgcctaccattgtgtcttagcagtatggcaagcacaagagaccttggataattaaatttttattatttttttattttttgagatggaatctcactctgttgcccaggctggagtgcagtggtgtgatctcagctcaccacaacctccgcctcctgggttcaagtgattctcctgcctcagcttcccaagtagcagggactacaggcgcacatcaccatgcctggctaatttttgtacttttagtagagactgggtttcactatgttagccaggctggtctcaaactcctgacctcgtgatccacccaccttggcctcccaaagtgctgggattacaggtgtgagccactgtgcctggtggataattaattttaattcattccacaatcactttgtaagcacctgctatgtgttggggaatgtgctaagttctaaggacacattcatttattctttcaacagacatttcaagagtgcctattatgtgcatagctctatgctaagcactagaggtaatacattaatttatccatcaagcctttagttaggaacaccgactatgtggcaggcactgtgtttggcaatgaagccatttaaatcacagcatacatctcatgaacatctgctgtgtcctatggctgtgttaggcagtaacatttattcactcattcaacagtgaggacctcatactgttaccttgtttaaaaacaaaacaaggctgggcgcggtggctcacccctgtaatcccagcactttgggaggccaaggtgggcggatcacgaggtcaagagatcgagaccatctggccaacatgctgaaaccccgtctctactgaaaatacaaaaattagccgggcatggtggcatgcacttgtagtcccagctacttgggaggctgaggcagaagaattgcttgaatccaggaggcagagattgcagtgagccgagatcacgccactgtactccagcctgccaatagagcgagactctgtctcaaaaaagacaaaaaaacaaaaaaaaaacaaaaacacaaaaaaacaaaaaacaagtaggcgctatgtgcaaggctcttgcaaagctattacatttgaattagatatgatttgcttgccttcaaggaaatcacaaactcacacttgtagtaaggataaaatatttatataaattagtaaaacactcattcatttcataatatttattgagcatctgttgtgtacaagaagaaattagatgcccaaataagaaagtaagtgattgagctgggtgtggtggcccatcgccacaaaacattaaaaaatgaaaacaggctgggcacagtggctcacgcctgtaatcccagcactttgggcggccgaggcgggtggatcacgaggtcaggaatttgggaccagcctgaccaacatggtgaaaccctgtctctactaaaaatacaaaaattagctgggcatggtggtgtgtgcctgtaatctcagctacttgggaggctgaggcaggagaatggcttgaacctgggaggcggaagttgcagtgagccgagatcacgccactgcactccatcctgggcaaaagagtgaaactccattaaaaaaaaaaaaaaaaaaaaaggaaacaattagccaggcatggtggcgcatgcctgcagtcccagctgcagaggctgaggcaggaggatcccttgaacctgggagcttggggctgcaatgagacgtgttcatgccactgcactctaccatgggtgacagagcaaaatgctgtctctaaaaaaaaaaaaaaaatttaagaaaataaaagaaatgaagtgataaatggacaaggaaagatagaagtgcaaggggatttggagctaggagaggccgggtggttggggaaaagctttgggaaggaggtgagggcatttgaggtaatgggaaccacctgagaaaaggcagggagctagctgtatcttggtaagtagctccactggatgtaacaatgttctcatgaaggggaatcatggggaaaatagagtgaaaaggcaccgttgggggcagaatatgggcccagaatgccaggaaagtgatgggaagggaggggagcttggaggtgttgaaacagtctagaaaacagatgatagagccctaagctggactgagatggagaggagggggaaagaaaatgagagacattaatgtcagaggtaagatggatgagacctgatgaccaattaaatgtgcaatcagcggctgggcacagtgggtcatgcctgtaatcccagcactttgggaggacgaggcttgtggatcataaggtcaggagatcgagaccatcctggctaacacggtgaaaccctgtctttactgaaaatacaaaaaattagctgggcgtggttgcaggcacctgtagtcccagctactcaggaggctgaggcaggagaatggcgtgaacccaggagaagcagcttgcagtgagccgagatcacgccacggtgctccagcctgggcgacagagaaagactctgtcttaaaaaaaaaaaaaaaaaaagtgcaatcagggcaagccacagtggctcatgcttataatcccagcacttggtgggaggctgaggtgggaggatagcataagcccaggaattcagaacagcctgggtaacatagcaagaccccgtctctacacaaaacaaaaaaaaactagctgagtatggtagtgctcaccagtagttccagctacttgggaggctgagacaggaggatcacttgagcccatggggctgaggctgcagtgtgccatgattgtgccactgcactccagcctgggcaacagagtgagaccttgtctaaaaaaataaataaatgtacagaggaagaggaaagagccagcatatttaagcctgggtgtggcacacattcttataacagccccatgaggctgttactattattattcccattttacagatgagaaacaggctcacagaggtgaagtgacttgcccaaggttacacagctagcaaatggcaagagccaagattcaaaccagtccaagttcgtagcacatgctctgcccgccaggggaacacaaagacagaactggaggagtagggaaaggtttcaaggagaaggtgacatttgaatggggccatgaagaataagcaggagttctgtggaggatcagggagagcattcagggaatgtaatagacagaaggcataggacagcaagggtcaagggagggccagccaccccagggagccacagtctccacctcaatgaagggtttgaagaatggtgagaccaggaaggcagggatcacccccatcatcatcttcccactcctcttctggcacccagctagactctgctcctacctgaatacagaggcagggaaccaggtctgtgtggttcaaggtaatgatctgcggtccagtctgtggaacaaataaaggaaggaggttggagaagataaggaggaagaggaggaggccaaagtcaaggaaaccaggaaggcagaagttcccccaccaattttcccttgcttggggtgagtcctcttcaaggatcctctctgatatggcactgcgtcctttgcacaggcatcggcctacagtgggaatggacttgggaagggggaggcctcaccaggtttttgtgccaccggggttttggggggccctggacctgattccagtacagggagaggccgaagtgctgctcctcagagacattcagaaccagatgcacgttgtcaccatctgctgacacgttgagccagggcagggctgg

SEQ ID NO: 869 - DNA, 308 bp, Homo sapiens
ttttttttttcctttttttttttttgagatggagtctggctctgtcgcccaggctggagtgcagtggtgtgatctcggctcactgcaagctctgcctcctggggttcaagccattctcctgcctcaggctcccgagtagctgggactacaggcgcctgccaccatgcccagctgatttttttgtattttttgtagagatggggtttcaccgtgttagccaggatggtctcgatctcctgacctcgtgatccgccagcctcggcctcccaaagtgctgggattacaggcgtgagccaccgcgcccggcc

SEQ ID NO: 870 - DNA, 1024 bp, Homo sapiens
gcggccgctgcaggtcgctcagcgacgtgcgcgtgcgcgggccggtcccacagcacgtagtggaagcacccgacggggcagccgctgcggcttctggcagctccctcgacagcttctccaggggttcactcaagatcagttggaacccctggcgccacgggctgtcatcagtggacagtctgcccctagatgagttgcccagcacggtacagctactgcctgccccgaccccagcccctgattctaccgccgctcggcagggggacggccagggagaggtccagccgcgcggcaagcctggggaatcccgcagcgcctccagtgataccatcgagctttgaagagcggtcctgacgcagggccaggaccctgcccgatgcccacatggcatggcctactgggacagttgagcctttaaaaaatgggcatcctggccaggcgcggtggctcacgccaggaatcccagcactttgggaggccgaggtgggtggaacacgaggtcaggagttcgagatcagcctcctggtctcgaacatagcgaaaccctcgtctctactaaaaatacaaaaaaattagccaggtggcacacgcctgtagtcccagctactcgggaggctgaggcgggagaattgcttgaacagggaggcagaggttgcagtgagccgagaccacgccattgcactccagcctgggtgacaagagtgagactccgtctcaaaaaaaaaaaaaaaaaaaaaaaaaaaaggcatccccaggcctctctacctgacggcaacccccgggggacagccaggtttgaactcaccccacccccatgccgttttttgcttttaatatttctatttttttttcagccggcattttgcacagaggccgtgtcttatgcggaatacagggtgggtgtgcatggattcgggcatgaagaacagggagcaggtgccccagactccccaacgtggagtgatgagcctcgcttgtctagattgtcctctttgtgccaaagaaataaacccttaggacttgg

SEQ ID NO: 871 - DNA, 7365 bp, Homo sapiens
gaaagcgtgttggccaaatctgaatgatgaaagccaattacaaactagaaaatgaaaacagaccccagatgcaaggagatgagacagttaaatttacttcctcttttctaatctgagaggtttcatgttgaagaaaatcagtgttggggttgcaggagacctaaacacagtcaccatgaagctgggctgtgtcctcatggcctgggccctctacctttcccttggtgtgctctgggtggcccagatgctactgggtaagtaaaatatttgaatattggtgtgggaatggagctttgcttaccttgggagaaaggaccagaaggaaagaaacatggactaattctggccctccaaagaagcagtattcaggtggaataagaagggtaggtataagaaagtttggtgtacaggattgaattactttctgaatataaaaatcttccatcctgaaagtcccctctgatcatgatatcctctctagctctaatctcaactcttttctttcacttgtgagacaagttttcttaaaagaatagtttgcacttgctatctccacttcctcacttctcacacgctcctcaatgcttgcagcctggcttccactggaattggttttgtctagggcacaacgatctctatattgactgggttatggcatgcttttcagttcatatcctgctggacttctctgctgcactgggctctgttgatcacttactccttcttgcattctctactaccctggcttccatggcaccattttctccttgtactacatggacttctcttgatcccttaatagcttctcttctcttccccttaaacactagtgttctctatagttatagccttgcctctgtactcctctttctttacacaatctccttcatgagcttatttgtctgtttaatttttgccactataactctgtatttaagagtcccaaatcatatccccaaccctaaccatgcttttgagcttcacattcaaatatcaagcttcataccagacatatctacctacatatctcacaagtgtctctgcaccatgtgactagagttgaacttatctgtccttttggcccctgcctcatctaattcattttccactttctgatctcagctaatgacaccagcatctacccttacaaggccataaacctcagaaacaacccagactcttccttctttttcattctctaaatctgatcaatcattaggtttggccaattttaccttctaaattgttcatagaagcagtcccttgcctggatcatcactaatgtcttaggacaagccctcatcctctatgacttgggctattccagtaaattcctaactaatctcctcgtccaaaccttgtgttcttgaaatgaattctgtaccctgcagacagagtaatttctaaaactcaagtttaccagcccaaattctttatcatggcacaaaaggccaagcagcctctacttttaccctctcagccttgtaacttatgctctaataaatctcaatcagttcatatttacatactcacacaccagactcttgcctgtctctaaggctttgcttataccactatctctacctgaaatgagttctttccatggcaccctactctccttctccttgcaaatgtgtaggtacccctaaagactcagcttaaatggtatcttttccaggtagcttttcttgaatgcttctttctgctccaatggctgcttgcgatacatttttcttattataatattttcctacttatgctgaaataatattttcatctacctgtgtcttccactaaattgagagctatttgtgggtagtgacaatgtttttttgtttttgtcttgtgataagaactgcagacttggaatcagatactcctgtttcaagcccctcttctatttaccagctctatgtcactttagaaaatcactttttctatttctggttcagttttctcatttgtagaatgaaaataataatacctaccacctaaggtttattgagtgagttcccagtaacccaacaagattttattttattttattttatgttttgagacagggtctcgctctgccacccaggctggagtgcagtggtgcaatcactgctcactgcaaccttgacctcttgggcttaagcaatcgtcctatctcagcctcccaagtagctgggaccacaggcaagtgccaccaggcctggccaattttttaaaaaattatttgttgagacagggtctctctatgttccccaggctggtctcaaactcctgggctcaagggatcctcccacctcaacctcccaaagtgctgtgattataagcatgagccaccacgcctggataagattttatttttaaaaagaaaaaatggagaggaggcagagcacagatgagtgacagtggaggaactgaaaagaggtagcattacagtgaagggagcggagaaaggatggaaagaaaacacctggtactgatgtgatgagaattaggaagtagggaggggtcttggtaagggacatgacaaaatcaaagaagaacgctgggctattgggagtggaagagaataaaggcaagtggggcacgaaatgacagtcagatggagtgaagaagtatgcacatgtgaatggccatgaggctggaggagggggagaatagttagggagataaagagcagtcccagagaagggagaaatgtcacttcccttgcctaggtctaccatgaaggtaagagataggttgaggagatgtggtgagaaatggataattctaaatttcaatctggagcaaagaattgttccacagttactaatatggactgggaggaggggaaaaaagacagagaaagctctgtgccactgccagggaaaattcaagtggcagaggacattaaagtaaagatggctgaaaagtgaagacctgcaagggggaggaagaaaggaggagagacactgctgggtactgaaagctctttgttagataacatattcaaggctgaggagccaagtgaagtttgggaaaatcagaatatgaaagaaagtccccgaggaaggtctgaggactgaagtagaccatatttgcacagtgaagtaaaaagaacattgattttggactcagacacacctgcctttcccgatccattgcttagtctctttttaagctttgggtatgttaatttggttttctaagtgtgtttctttaagattataaaatgaggataaagtcacctacctggaaagtttgtgaggatgaagttagatactgcacacaagtgctagcagggtctggcacccagtgaacattagaatctgatgtctccctttcattcctgtcctatgcctccctgcttcgagttaccattgtctttgctcctggtttcccgtaccagcagctggatgtcatgccggtgagtttcaccattctttcattctctcccctccctcttctccaaaccacagtgcatttgctgagagcacctggacgccagtgaatcaaggtcaaaactatccccctgagacactctcaggggtctttccgaaaaaaaaaaaggttttgatgtcttactagtctcattctaaaaaggatgattatcctgggagatggaggaaccctgtcctctttctccaagttgcatcatcattttctggttctccctgggccatgccctcttcagctgccagttttgagacgctgcagtgtgagggacctgtctgcactgaggagagcagctgccacacggaggatgacttgactgatgcaagggaagctggcttccaggtcaaggcctacactttcagtgaacccttccacctgattgtgtcctatggtgaggtcctgggaaggcctgagcagtgccccaaaccccttctttcagcctcagagcccacccaggaaagtgtccctaggaaattggctatgggatgaggtacttccttcccagtcttcagcccacagcaaccagggtgctctaagtcctaggccctagggaagttgtcccatactcccaaccaggggtgagagtttacctggaccctcagagaaagtttaggggagtaggcatgcttgggggtggcccccaagggaggccctgggtgacactcagctctttctctggaccatagactggctgatcctccaaggtccagccaagccagtttttgaaggggacctgctggttctgcgctgccaggcctggcaagactggccactgactcaggtgaccttctaccgagatggctcagctctgggtccccccgggcctaacagggaattctccatcaccgtggtacaaaaggcagacagcgggcactaccactgcagtggcatcttccagagccctggtcctgggatcccagaaacagcatctgttgtggctatcacagtccaaggtgagagctagaagcagcattgtcatggcaggggagggtaaggagagacagggagcccaaattgtctttctttagcctggaggtagcaagatcatcaacagactatggagcaggttgctggcaaatgcccaagttgggcttcgaaagggacgagacctcagccttttgaagtcatccagccccactcagagtccagcatagttcctaccacccagatctatgcttcctagtgctcactgattgggtgtctggacaactatcagatttgcccatctgtggatctttcctagtcctgtctacttacagaaagaacttgacagattcaaatggaatctaagagagcccattcctgctggaaacaggggaaaggaagtatgactccccaagtctcttcacctgcatgtgtctacctgtatataagatggctgagctcttctttcctgcctatctttttcccagaactgtttccagcgccaattctcagagctgtaccctcagctgaaccccaagcaggaagccccatgaccctgagttgtcagacaaagttgcccctgcagaggtcagctgcccgcctcctcttctccttctacaaggatggaaggatagtgcaaagcagggggctctcctcagaattccagatccccacagcttcagaagatcactccgggtcatactggtgtgaggcagccactgaggacaaccaagtttggaaacagagcccccagctagagatcagagtgcagggtgagttcgcatcagagtgcaggttgtctgtttggcatgcgtgtgagtgaaaaggagggataggataaattgacctgtgagctggggttcagtgtgagcaggttaagaagggacacagagggggcaggaacaatgggccagaatccctgatgatgagagacagcacaaatagagaacttctccctcagactgtggtgcacacctcaccagaccaagagctgagccagctccacacctgctgccccacaagccttagcatcccccccaacatgctctctgggcatttataggaatttaatatctggaatgaagatgggatagtctgaagtctatgttcaattctgggagccactgttaagaggctgcacttgacctgaaacactcccagaagaggtgtccagggtgataagggggcttaaagtcatgtcatatgaaaaataatggaaggggctggagatgctatcctgaagaggaggtgactcagaggccagcagaggtgtcctcaaaaagctgaaggctggcattagcacaaggaattggactaatgtcttatataataaagaggctgacctagaaccagttaccacattcatgcttcagggaattagattcagccttgatagagaaagaactggctaatagttatagctgtccagtggtgaagcctcactgctgaagaatttcaaacagaagtggccaagcttcagattaaaatttggaccaggagggacactagagtcctcaagtccctgctgccattgggccccacagccactttcagagaacaagaaagattggccagggatgggagggaagggccagagtcagacttcactcttgtatgtgcctcctgccccataattcaggtgcttccagctctgctgcacctcccacattgaatccagctcctcagaaatcagctgctccaggaactgctcctgaggaggcccctgggcctctgcctccgccgccaaccccatcttctgaggatccaggcttttcttctcctctggggatgccagatcctcatctgtatcaccagatgggccttcttctcaaacacatgcaggatgtgagagtcctcctcggtcacctgctcatggagttgagggaattatctggccaccggaagcctgggaccacaaaggctactgctgaatagaagtaaacagttcatccatgatctcacttaaccaccccaataaatctgattctttattttctcttcctgtcctgcacatatgcataagtacttttacaagttgtcccagtgttttgttagaataatgtagttaggtgagtgtaaataaatttatataaagtgagaattagagtttagctataattgtgtattctctcttaacacaacagaattctgctgtctagatcaggaatttctatctgttatatcgaccagaatgttgtgatttaaagagaactaatggaagtggattgaatacagcagtctcaactgggggcaattttgccccccagaggacattgggcaatgtttggagacattttggtcattatacttggggggttgggggatggtgggatgtgtgtgctactggcatccagtaaatagaagccaggggtgccgctaaacatcctataatgcacagggcagtaccccacaacgaaaaataatctggcccaaaatgtcagttgtactgagtttgagaaaccccagcctaatgaaaccctaggtgttgggctctggaatgggactttgtcccttctaattattatctctttccagcctcattcagctattcttactgacataccagtctttagctggtgctatggtctgttctttagttctagtttgtatcccctcaaaagccattatgttgaaatcctaatccccaaggtgatggcattaagaagtgggcctttgggaagtgattagatcaggagtgcagagccctcatgattaggattagtgcccttatttaaaaaggccccagagagctaactcacccttccaccatatgaggacgtggcaagaagatgacatgtatgagaaccaaaaaacagctgtcgccaaacaccgactctgtcgttgccttgatcttgaacttccagcctccagaactatgagaaataaaattctgttgtttgtaagctattcagtttgtgtattttgttatagtagcccaaatggactaggcagttggcctctgccacatgactgagtttatgatatgttaaaaatactcataaaacagtg

SEQ ID NO: 872 - DNA, 2593 bp, Homo sapiens
tgggcacctgtaatcccagctagttgggaggctgaggcaggagaatgaatcgtttgaacccaggaggtggaggttgcagtgagctgagaccgcaccattgcactctagcctgggcaacaagagcaaaactccgtctcaaaataaatacatacatacatacatgcatacatacatacatacatacggggattaaaatagtctagtagtgacacctgaacagagagattgatccaagaaatgaaacagaaattccggaagttgacctgaatacacacacacacacacacacacacacacacacacacacgaaggcgtgaaagactccatgaccctcaaggtataagatgcattttttttttttttttgagacagggtctcactctgtcacccagactgggtgcagtggtgtactatcccagctcagctctaccctccatccccccaacctcccccaaccaccctgagctcaagcaattctcatgcctcaaccctcagcctcatgagtaactgggactacaggcgtgcaccaccatgcgcagctaattttttgtatttttagtagagatgggtctaaccatattgcccaggctggtctcgaactcctgagctcaagcgatcctcttgcttcagcctcccaaagtgctggcattacagctgtgagccaccgcacctggccgcattcttctaaatcacagtacatctggctcccagtgcccaggctctcagggcagaaggtccagtgtgatcactttgcatggcctctctcccctcctgagcttgtgccagggccccagggctgacctggagaaggaaaatggcagagggtgaagatggggtgtctggtttggggaccatcctggccccccttgtcactgttgacatctcttctgcacagtggcattgctgggaggtgcttactgtgcctattcaaggggctggcagccgcagcctcactgcagatcagggacttggcttcccagttgaccacaggtccaagaacctgcagggtccagcctcccccccatccccagtcttccccaccctggcccggccctccaggtgcagaaacatgcaggcccctctccaggactgtgggaggagcgtgtccctcagactggcctgtgtcctggctcctcttaccacctcttccacaggttgtcacctgcagctgccccaggataaaggcaaggccagagaggactcctgaactcctgtgtgcctggggtggcaggggcaaacatagccaactggtggcctgagcggggccatggtgaggacacccttggtggcttgtcccacatcaagctgggaggtgacactgaggatgcattagtctgcagcgtatgataaaaacggcatttcaggccaggcgcggtggctcatgcctgtcaccccagcaccttgggaggccaaggtgagcagatcatatgaggtcaggactttgagaccagcctggccaacatggtgaaaactcatctctactaaaaaaacaaaaattatgtgggttggtggtgtgcgcctgtaatcccagctacttgggaggctgaggcaggagaatcacttaaacctgggaggcagaggctgcaacgagccgaaattgcaccactgcactccaggctgactccgtctcaaaaaaaaaaaaaaaaaaaaaggcatttcagttcaaatagggaaaggatacatctttctttcttttctctttctttctttctttctttctttctttctctttctttctttctttctttctttctttctttttctttcctcccttccttccttcctttctctctctctctctttctctcgttctctctttctttttgagatggagtttcactctcgctgcccaggctggagtacaatggcgtgatctcggcttattattattctccatgttggtcaggctggtcttgaactcccaacctcaggtgatccgcctgcgttggcctcccaaagtgctggtgtgagccactgcacccggcttaggatgcatttttcaatattttagtgtttgaataacgggctaacttgagaaaaaaataatttgaatcacacatcacaccaaaaataaattctaggtggattttaacactttcaaaaattattattattattagtttagagacagggtctcactccgtcgctcaggctggagtggagtggtatgatcatggttcactgcaaccttaaactcctggcctcatatgatcctccagcctcagcctctcaaaggactggaactacaaacatgcaccaccacgcccagcctaggtgggtttttaaaatccattcaagggcgggtgcagtggctcacacctgtaatcccagcattttgggaagccaaggtgggaggatcacttgagcccaggagttcgagaccggcctgggcaacatagtgagactacatctctacaaaaaatttaaaaatgagccaggcatggtggtgcacacctgtagtctctgctattcaggaggctgaggcgggatcattgtttgagcccaggagacagattgcagtgagctatgatggcaccactgcatggcagcctgggtgacaaagggagattcagtctcaaaaaaaaaaaaaaaa

SEQ ID NO: 873 - DNA, 149 bp, Homo sapiens
ggctgggtgcagtggctcacacctgtaatcccagcactttgggaggccgagacaggtggatcacctgaagtcaggagtttgagaccagcctggccaacatggtgaaaccctgtctctactaaaaatacaaaagttagccaggcgtggtg

SEQ ID NO: 874 - DNA, 8996 bp, Homo sapiens
gacggggtttggccatgttggccaggctggtctcgaactgctgacctcaggtgatccgcctgcctcggcctcccaaagtgctgggattacaggcgtattccactgtgcccagcctgagtttctgtttagaaacaacagtctatgatagtataatcctctcttttttgtacacagagtaaagaggacaaataggtgaaagaataaatgaaaggctggaatcccacttcccccgctgtcccagggcattggatattgacggataggaggcagcaaaccactcacagagccaggaagaaatgaaggcgttggtattgccaggaggggaagccggctcggctgaaatacgctatgaccatagcaaggagatactgatggagagaaaggaacacagagagggagaggtcacatcttggaagaggaagattgtggagagggggaatgagggtctggggaggggctgcccatcagagaagggacctcagtgttggggtgactgtactcatttggaaattgcgggatggaggggtattcgaaggtcggatgcaaatccgagaagccagaggaagggttttgggtgatgctcccaggatggtgggctccgatgggatctttggagggggtgtgtctaggttggctggtgtcaggagggtcttttgtgtgccaggcagagaactgtcccgaagagctgagagtagaggggccaggagcttcagggctgcggccagactgtggcccagagctcagatcccaaaggacccataggagaggcaggggccactcattcactctgcaagagaccagcagaatcctgagggagatgctgacaaatcataaaaagaccaagaatagccgggagtggcggctcaagcctgtgatcccagtactttttgagaggtggagacaggaggatcatgtgagcccaacagttcgagaacaacctgggcaacatagtgagaccctgtttccacaaacatttcaaaaattagttgagcatggtggcatgtgcctagtcccagctcctcaggaggctgaggaaagaagattgcttgagcccaggaattagaggctgcaatgagctatgatcatgccactgcactccatcctggggagcagagctagattctgtctcacaaaaaaaaaatttgtgggtgccaagactcaagaccatgggagctggtcgggcacagtggctgacgtctataatctcagcactttgggaggccaaggtgggtggattgcctgaggtcaggtgttcaggaccaacctggccaacatggcaaaaccccgtttctactaaaaacacaaaaattagccaggcgtggtggttcatgtctgtaatcccagctgcttggaggctgaggcaggagaatcgcttgaacccaggaggcatcggctgcagtgagtgaagatcgagacactgccctccagcctgggcaacagagcaagactctgtctcacacacacaaaaaaaaaaaaaaaaaaaagactgtaggagcatctggtgggaggtggtggagggagaactgtgggtttggaagctgcgccctccccccagccatgcgttggaacaggaacagttacatggagaacaaccttaccttgtccgacaccctcagatctttgtcccaggccaggaatcttttaatgacaggatcctctgtgattagagagcagatgtcagtgtgagaagcaggacagggtttccgtgggagcagcagggcagcgaggagaagtgtgcctcccggggggaagtctcaggattgtggccgcgggtgaggtggatgggagaggggagaatgactttcactgggcaagggagagaggctcctgctctgagactcccctgagaagaggccgaaggaggccctgggtgtgagaatctacaggatgtagagctgggaatcagccaggaccccctccagcagacacggagggaccactgcagagtcataaaggaattcccatcatttcctcatgagacagtcacacatcagggtgtgaccatggccttggtatcccccactatggatggagacacttaggtttagaaaagtcagtaagagacattaagtttcagagggcacagctgaaaccactttctttgtttattgattttgtttttctttatttgatttttatttttatttatttattaatttattttgagacagagtcttgctctgtgggccaggctggaatgcagtggcctgatcttggctcactgcaacctctgcctcccgggtttaagcgattctcctgtctcagcctcccgagtagctgggattacatgcatgagctactgtgcccagccttggtttttcttttgagacagggttttgctctgtcacccaggctggagtgcagtggtgtagtcatagctcactgcagcctcaaagtcctgagttcaagcaatcctcttgcctcagcctcccaacgtgctgggatctcaggcgggagccactgcgcctggcccgaaaccaagctttcttatcccaagcgctgacctttatcaagttgacctaatcctttatcatctcctaagtgtccctcatgagtgatcacttcacattcctcccacatggagagctcacccactggggcctatttttcccattggaaaagtgtggttattggaagtttcctgtttttggaaagaacaggattggaggtgctctctggggtgtcctcctaccaagcagcctgttgaaggcctcgtggtgctcagggagcacgagcgacactcgccgtcgcttcagcttcatcttgaggccacacagcatctccgccacccagatctcctcaggctcaggggcgagcaccttccgtggctcctcctccgactcctcagatttgtcccaccactccatcttccttttccagcaaaaggacctatgcggggggctgggatctaccccaggggctgagtaaagaaaccaggccacggtgtaatgcttctgcagttgatcacactagagcccgacccaaaaccccaaaccactctccatcctccccagcctcgcagactgctggcttctccaagccatctttccttctgtctgtctcctctgctgagctccatgtgccgctccttctcctccccattctcccgtttctctgtcctcagaacacttcctcatatccttccctggtccctggctctctgagtccctttttttttttttttttttttgttgttgttgttgagaaacagtcttgctttgtggcctaggctggagtgtagtggtgcgatcttggctcactgcaacctctgcctcctgggttccagtgattctcctgcctaagcctcccaagtagctgggattacaggtgcccaccagaacgcccagctcatttttgtgcttctagaagagacagggtttcaccatgttggccaggctggtctccaactcctggcctcaagtgatctgcctgcctggcctcccaaagtgctgggattacaggtgtgagccactgaaccctgcctcagtacctccattcttcccacacaccctcctcacgtgctccttcctgacttctgggcccgcccttccttcttttttttttttttttgagacagcgtctcactctctcacccagaatggaatgcagtggcactatcttggctcaaaacaacctcttccacctgggttcaagcgattatcctgtctcagcctcccgagtagctgggataacaggcatgcctggctaatttttgtatcgttagtataaatgacgtttcgctatattggtctggttggtctcgaacaactgacctcaagtgatccacccatctcagcctcccaaagtaatgggattacaggcatgagctaccacacccggccttcgtttttcttttgacacagggttttgctctgtcacccaggctggagtgcagtggtgcagtcatagctcactgcagcctcaaagtcctgagttcaagcagtcctcttgcctcagcctcccaacgtgctaggatctcaggcgtgagccactgcacctagcccgaaaccaagctttctcatcccaagcgccaacctttatcaagtctagcctagtcctctattgtctcctaagtgtccctcatgagtgatcacttctgagtcctcctgcgtggagatctcacccactgggggcgtatctttcccattggaaaagtgtggttattggaagtttcctctttttagaaagaacaggattggaggtgctctctggggtgtcctcctaccaagctgactgttgaagtccttgtggtgctcaaggaggatgggtgacactcgctgttgcttcagcttcatcttgagcccacacagcgtctccactacccaggtctcctcaggctcaggggcgagctccttctccggctcctcctcagattcatctgaccactccctcttccttttccagccaagggacctacatggggggctgggatctaccccaggggctgagtaaagaaaccaggccactgtgtaatgcttctgcatctgatcaccttagaccccgacccaaaaccccaaaccactctccatcctccccagactcgcagactgctgacttctctaagccatctttctgattttctcctctgctcaaccccatgtgccgctccttcccctccccattcttctctctctctgtcctccgaacgctgcttcatgtccttccctggtccctggctctctgagtccctccttttttgttttgttttgttttgttttgacacagaatcttgctttgtcacccaggttggagtgtagtggtgcaatctcagctcactgcaacatccatctcctggattccatttattcttctgcctcagcctctcaggtggctgggattacaggtgcctgccataatgcccagctcaattttgtacttttagtagagacagggtttcaccatgttggccaggctggtctcaaactcctggcctcaagtgatccgcctgccttggcctcccaaagttctggggttacaggtgtgagccaccgcacccagcctgaatttctccattcttcccacacaccctcctcaggttctccttcctgaccgctgacccttcttttcttttcttttcttttttttttttttggagtgcagtagcgtgatctcagctcactgcaacctcttcctcccagtctcaagtgattctcctgtctcagcctcctgagtagctgggattacaggtgtgcaccactaccacttggctaatttttatacttttagtagagatggggtttcaccatattggccaggctggccttgaactcctgacctcagatgatccgcccgcctcggcctcccaaagtgctggggttacaggcgtgagccaccgcacccggcccccttccttcgtcttagtcaatcctatcccacctcttcttccaccagtcccctcacctgatggtcccaacacttcatcatccaccacctcctggagggggtaccccgaggtgctccgctggggactctgctcattctggcggtgcggttgacggctggtcgtgatctttcccgtaatctgtcccctcttacggaacctagtctccgttctgtccatggccttcttctggacactgctaggatccagaagagtatgttatcaattctcaagcctaggagaagtcaggagtggagaacagctctgagaagatactgttgtccaactgatctccaggcaccacggagtccggtccctccaatcaggaaggtcggaatctctgatgtcatcgttcatgccaacctggcaaccagtttgaaaaaaaaacacatgtaactgccaggctgatctcttgtcctggagatcctgggtgaatggtatctcctgccactgtcccaacctcagaccattgtccaaaagcatcttcagggactccacatccctctgttccctgtcccagcagaggctgtgtcctctccactcaaagcctgaagcatgttggggtctcttcgtctctgtacgtgcccatttcagagtccagtctggtgggagagggaacagagtgggaaagaaaactagggtaagcagaaacgatgaaaccttataagagtgagattatcatgtacaagagtgagattatcatgtacaagagtgagattatcatgtacaagagatcccaggaatactgacttgatgaaaaagtcacatcagagcactcagtttggcagagcttttctgctgaatgtttactcacattcactgtccaagattctgtactgggggtacatacgtcctctgccctaaggcaattttgagtccaagagacattttgaggcctaaaaatcataggaaactgcccctgagctcacacatatttccaatggagctcacacatatttccaatggtgtccccaatttcagggaatccatggattacctaagccagcccctccagttcggctaagaaactctagtctatatatcaagttttgtatcatatgtattgctctgaactcagaaatttcccttccatttatggattctatgaataaaatatcacatgtacaaaaagactaagtcgaaaaatttcagctgtgcacagtggctcatgcttgtaatcccagcactttgggtggccaagggaggaagattgcctgaggccagcagttcaagaccagtataggcaacatagcaagagcccatctctaaaaaaacaaaaccaaaccaaattagccaggtgtggtggctggcacctgtgttccaactacttgggagactcatgtgacaggaagatcacttgagcccaggagttagaagctgcagtgagccatgatcttgccactgcactccagtctgggcaacacagcaagatactgtgtcaaaaaatttttttttgataaaaaataaaagagttacatgacattcagagaccatccaaaaaacctgcgggttcccggctgggctcagtggctcatgcctgtaatcccagcactttgggaggccaaagtgggtggatcacttgaggtcaggagtttgagaccagcctggacaacatggtgaaaccccatctctactaaaaatacaaaaaattagccaggcatggtggtggatacctgtaatcgcagctactcaggagagggcgctggagaatcacttgaactcatggtgcgcaggttgcagggagccaagatcgcaccattgtgctccagcctgggcaacaagagcaaaactccatctcaaaaaaaataaagaacctgcgagtgagttcccacacgttttcctgatgggctgctgctttcctaggagtctctcgctcatagaaaaggcacaaactgaaagaggaagcagatcccattgctgtggaagtcccattgttaggaagctctgcttttctggagttcaaattcgcattcatgacgctttaaaccgtcagagctgggtgggtcctcctacaacaaaatcgtttgctctctctctcctagttaacaggctttcaaatattagaagatcaatgttctgaccccattaaaatttctcttttgtggaatgaaaagctctgatttaacccatcttcaagcctggtttgatggaggaataggggctgagtcacctgcatttcccctccctgcacaaagtcctgggcccagatctggggtctgtctctgctgagggtggggtgaaccaggaagcacctccctctacatctccttgatgaatgggtataatggttgccatggaactggggcttgtttgatgacctggggctgggtgggcctctgagagcctttatagctgattgccttttgggagagggcaggtgggagccccaccctgtcttatgagtcaccccaaaggtgcatgggcaggcaggtgctggggaatcggctactccccagagcttggcgtggccatccctgtggcccctctgggagtctggagcccattccctcacactggtactctctgcagctggggacatctgcactaggaagacaggacacggcatggaagctggcctctgcccagaagccatgacattctggtcaccagcctgatgctataaaacgagtgtcacggccgggcatggtggctcacacctgtaatcccagcactttaggaggccaaggcgggtggatcatgaggtctggagttcgagaccagcctggccaacatggcgaaatcccgtctctactaaaaataagaacattagccaggtgtggtggcacatacctgtagtcccagctcctctggaggctgaggcaggagaatcacttaaacccaggaggcggagattgcagtgagccgagaccacggcattggactccaggctgggcaacagagcacgactccgtctcaaaaacaaaaaaaaacgagtgtcacctggggctacttggccagacacagagagcaaggagacatccctattatctgtcaaaaataattgttggggctgagcacagtggctcatgcctgtaatctcagcactttgggaggtcggagcaggaggacttgaggcctagagtttgagaccagcctgggcaacatagcgagcaccccatctccagaaaaaatttaaaaattggctgggcgcagtggctcatgcctgtaatcccagcactttgggaggccgagggggatgggtcatttgaggtcaggagtttgagaccagcctggccaacatggtgaaaccccatctctactaaaaatacaaaaattagccgggcatggtggtgggcacctgtaatcctagctacttgggaggctgaggcaggagaatcgcttgaacccaggaggcggaggttgtagtgagctaggatcatgccattgtactccagcctggacagcaaagctagactccatctcaaaaaaaaaaaaaagtaaaaaatttaaaaattagatgggcatggtgacatgtgcctgtaatccaggtactaaggaagctgaggtaggaggatgacttgagtctaggagttcgaggctgcagtgagctctgatcgcaccactgcactccagcctgagtgacacagcaagaccctgcttcaaaaaaaaaaaaaaa

SEQ ID NO: 875 - DNA, 14976 bp, Homo sapiens
gaggggccgcgcgcacgggaggacggagaggcggaaaggatggcgctgtgacagccgggccggagccctcgcgtccccaccccgcgccctggccgctgggcccggcggtgagtgcgcgcgggcgggggcggcggcggcgcggcccctcccccgggtcccgggcggctgggccgcggcagaggcgggggcgccgaggctgcgccgccgccgccgccgcctttgttgcgggcccgccggggaggcgggcggcgccggctctcgccgcccggcaggtgcgctggggccgggagggggccaggtggggaggcgggccgggcggagggggcagcggaagcgctcccggcgcggttccgcggagaaagggaaatggggcaagatggctggagaaatccgaacgcgcccgggggcgcggcggcggtggcgcaggcggggcagggcgggcggcggccctggttgcggcaccttagcgcggggaggcggcccctcccacctctgccccggagccggcagggagaccgccgccaagttcgggccccagctgcaggcatctgaagcctagacccatccatgccgcgttcgcctatcttttttggaaatatcgaaggaaccgactttgaactccagagggatcttttctttggaggttccccgatgcagccctcaagatgcatccgcactccacacctaggaattgcccgcgcccatagagggcaggagtgcggccctttgtactggccaagagtcagcgaatagagaatttgcagcccagaggcaatgggttatttccctgtcggggtgggccccagccgatttctgcacctttttgggtatccaggcataaccctcactatgtttcactgactcctgcgtttgcaaagtcccttaaggtagaatgaccctattttctgaaccagctcgtggacagaacctttgaatttggaaaatccaggcaatgggcctactgagccaaccgctccgcccatgcttaactggcttctagcacccattccagttgagtaagtgtccaatctgtgttcagacaccttcactgataggaaatcagcacctttcccctgcctctgattcctgtttgggtggcactggctgtgagaaagtactgcctttctcactgcttaaaaccttttccaggagtatttatccactggccggcctctgttctgccgtccagtctctacaaaccagtctgggttctcttccccagatagctttttaaatatttgaaggcagccagatacgttatctacccacagcctctcttatcataattaaacatgtcaccctgtagcttcctggccgactcttgtttccttacttccctccagcgggaacagtgcttggggctaaagaggtttgtatgtggctcagcctcccccatcataggctttggggaggtcacagtgacacctggtttttctgaacctgaatcttgcttgcagagatggagtccacagcctaccctctcaatttgagcctgaaagaagaggaagaggaagaagagattcagagccgggaactagaggacggcccggcagacatgcagaaagtacgaatctgctctgagggcggatgggtaagtaagaaggtgtggagtccacacagccagcagatgcaggcctgagagcccagcttgctttaagtctcctcctcagacagacgtgggaagtaaaaatagcccagcccggtgtgtttgcattcctgagaaaacagctctgtggctttaaaaggcagtgcaaagaatggaggaggtgttatggaaacagtccctcagccatgtagcttgtcatcgttcaattggaagtcctagaagccaggaccttgtctctctcgttcacccacttatcctgcactgcgtttgatgccaggcacattgtaggcaccaagtaaatgtttgttgacttactgctggttgaagggaaccattttaaataagactcgagtcattgggttgacatgagaggttaggctagttggttctgtgtgagcacctcttaccacagttgacacaggagagctgcctgtccagctgacctggatagaaatggtgggcagcagggaatacagagattcagggtatacacgcagaatagtatgatagaggtcggtttatacaaatgcaaatgcagtagatacttatagttacagatagttattcaccgtagttactggacttcgtggtaattaggcatgaatagtaaacattttaaataagcaacaaattgacattccttttctctgcttattttccgttgtgtataaacattgtcagtatacatagtatcctttgcttccatgaagagcccctatccatacaagcatggtacttctaaattgttccctaccagaggagagaactgggatgcagaaagattatctgccttgccctaaggttacacatgaacactgacatttgttcttcaaaacaggtctcctgagctgcacccttaaaagtaatgcattttaccatatgtatgctataccttaatttaaaaaaaaaaaaaacagtgcaaccacaggctctcagtttgccagtctagctgtggacaccgcgctgcctttgtctcatcagtgttctttgcccaccacatccttcttcccaattctgatccaagcaggcgtcaggtctatttagcctggaacaagaactcaaggcagtcaaaactcagggctttgaggctagattggtcaacccagaacatctaaatggagagccttggagaacaggtgcaatgaaagtgaatgttgggacagtgaggaaggagcaagatgaagaccaaccatgcttaggtgggaaaagaaggaagtaaccagaagggctggaggagggagtccagcagctggtggtgctggggattgggcatttgtggcctccaggcaatcagccatccatccacagttaccaagcacagtgctgggcgtaaagagagactcttttcctgatggaatttccagtcttgtgagcaaggcaggaaagtaaacataagtaatagtaagcacagtgtgcagagtgcagtggtggaagtctgcaaggatgcaccaggagccaagatgaggggatgcctcattcaggctgagaactccggggcttcctggacaaggcctaatcttgagcagtgagcaattttgcccccacccctggacatttggcaacatctagaaacactaccccctttccccacccctggatatttggcaatatctggaaacacttttgttggtctgacttggtgggggtgcgttggggactgggagatcctcctggcatctagtggatagaagccaggggagctgctagatatctacagtgcacaggatgcccccccaccaccacacacacacacacatacacacacaacaaagaggtaactggcccaaaatgtcagttgtgctgaggttgagaaaccctgctctagagcattagaagaaaagaatctgtttttaaaatatgtattttggttatagagaattatgttagggtgatcagtgaaagcttttcaagcataagaactatgataatatattaggataaaattccatagaattgaaatagaaatacaattttaagtagaaaaaataaaaaatgtgctttgaactgagtcttagtcattatggaatcagccaagggaagggaagggggttgcattccaggcaagaggacagcacaggcaaaagcactgaggagaggagcttgggtgcagagttaggagcagctcctgcagctggaacctgaaactcatggcagggagtggaaggggatcaggtataggaggccaggccaggggccagagccagccaggaggacatgcagtgctacgccagcgagtttgagctttctccttagctctgtggaatgaggccttagcccatctttctaagggaggcctcaggctctctacagccaccatgctaaggcctgagtggcctgctaagaaagcaaagctttggcatcagactttctagctctgtgaccttggacaagttacttaaccactctgtttccttacccataaaagtgaggtagtgatccccatgtccctagtttagcggattcagtgagagaatatatttatatgattgagtgtcctatacagtgcttggcccatagcaggcactccatcagtggatcagtacaaactaccccaaccccttcccccgagatccctgcgtctttgctgggtggctgcaaggctttagcgaggctgtgcaaggtgtaagcactttacaacatttaccctttgagatagcattggaatgccaacttcctgagcagagcaaggcagtgcacacaagctagaggaagaacacttatccagtgagcccttgatcttctgaggaaagggaggagggcagggactgaaggtccctacctgcaaggccaaggaggggtgtctggaggtggtacacagactgcctgacttctcagttttgcccggggccggccctgtttaccttctgctatgttgagccagataaaaggcctctgtggagcgaggggaggcctgcgcagcagggcctggctgaaggatcgctccattctcacagaggcttgctgtgaggagaatgtctaagccactacactgtgcctctggagcataatgtgggcttgtttgaagatcctccgtggctcagtcattaataggaagagatgaatcctgcaccagcccccagctttcttcctgcagcttcagggctcctggtacctgatgtttttaccaggcctagaatatgttaccccccctaagagtattgatggcccctctgaaatgacaggcatagacagtcctgttcccattttatcagcaaagggaaagggactataaataggtatgacctagatctggaacttcccagggagaaaaaaaggccaaagagacagttctttaaaagcctgggaattgggaaaggagtagggtggaaaattcctgggctgactggctttccagggtgaggaagtctgaggaaagcctgaagacgaatccattttacctcctcatatttcacacttagggatgtttgtccattcttactccaaagagtaggtttggttttatgacagataaaatttaatgattctttgaaacagttccaagtagaacaagagaagggaaatccagagatttgcctagatcgtatattcaaaagcacatttttcagtgactactagctacaggaagtgtcctcggcttagggaagcaaaaaggagtaagtacaggtcctgctttcaacaagctcagattctagtggagggagcagacaagtcaaccaaaagaattctgcagtgtgatgagtgccccgggagtgtggagcccaggacatttcagggacatgtgggtgtgctcacagcgtggcacagagtgggcttcctcgggagcagggattttgggctgagtcctggaagatgggtgggtgtcagccagaccaagaaaggggaggccctccaaggccaggggagaatatgggccaaggtgtgggggcgttggggaatggttgttcagggaactgcacacagctgagtacaagtggagcacagagctggggagagttgagggttagtcatcagggaggcagctgtgctcggtattgctggatccttggggtcaggcggtggtggccccaaaacgcaaccccaccatttattggctatgacattagcctggaaatgagacctctccaagcccatattctccttgattaagtaggggcatggtggcttgtgcctctaatcccagctactagggaggctgaggcaggagaatggcttgaactcaggaggcagaggttgcagtgagccaagatcgtgccactgcactccagcctgggcaacagagcaagactccatctcaaaaaaaaaaaaaaaaaataggcgtatctactcctccacaggcccattgcagggaataaatgaagcagttacaggccctttcctagtacgtgcttcctatgtatgaggtgctgtggaggtggggagagaacaagggggcttccttgggtcagggaggaaaggccaatgtatgtaagtgactgttggcctgacccctgaagtggctgcaggctatatagcatatggacactaattttctaagctaaggaaaaacagtatcataatcacccagacccaagatacagctttgggaaatagctttgaaggcaagaatacaaaataaccagcctgaaacaagccatccagtgccttcttatcactaaataggatgagctttggagtaggatttttaatgactgtaataagaaatacagttaaaaacaaaaagaggaggttggtttgggtggcttggctgccttgggctactgaggagccccctggtgctgggccaggaagcagaggaacaggggagggatgcagtcctttgggctttctgcctacctggtccaggatcaaagtgaatgagtttgctctggcatctcattacatatattaagctgtaattagcccttctttcttcctcttcatgctcttgtggattggaaaggccaaatagggccccttctctcagtggctcctccctgggcagctgtgggttccaagtctaacactttggttagtacccttggaaatgcagtgccctggaaacccacaaagatcccacggagggcagtgatcctattcagatttacaaacccaactcaccccgcccggggccgagggtctttttctggggtgggagggaattgggggtgcttgtgttggtgggacactttgtctgggtgtgggtggcttaagtcttgggtcagaggtgagccgtgagcagctctcaccacagtgcatgagggtgcgatgtcccatgtcctccaaccggtgatcatggtagggagttagttttcttctcaaagtgctgcttaccttatctgaactgagggtggcagctgctgtggtgggcacagaaggactgtgctcttgcccttgttggcttccagcagctgtatgaatgtggacagtccgttttcccctgggtcagggtccctcacctgacctgtgagaggacaggctgtgctgggctgtctgtaaggtcctgtccgctctgaaagtctgtctgcatatgcctgtttgtcattgtgaaagggctgttcactcttccaggtaccggccctatttgatgaggtggccatatatttttccgatgaggaatgggaagttttgacggagcaacaaaaggccctctaccgggaagtcatgaggatgaattatgaaactgtcctgtccctgggtaaagctgtgttttcctttgtctcctggaagctctgagcccagagaattgtttccatgcctctcttctctggtatatccaatgtccctctctcctgaacttagactctgcctcctcaatgtctgtgcccatttattccaatttttgatttgggcagtatatcaatattgtgtcaccctactcggcaatccgtgctgcctcagaactgcccccattcaacccaggcattcacatttaaggataaaaaccatgtaaccttagaaatgtcaccatggatctgggcctgtgcctcactgttccttacgagagaaggcaggcgttaatgttaccctgtcagcctcagaagtttggggacataccctcccaaagactgtttgctcctctccccaacttccaccccaaattgatatcacacatcttatcagcagaatgtaatcatttgaagagatttcccagtttgcttatacaggtaccaaaatgttaattggatcagcagctgcattcacccttctccctgctaaatgcagttcttttattgttggtgccaataccatccctcattaggagagatctacccattcctttagacagacctattttccattatcttttttctttaagtatccctgagcctttttccccttgtttttcacaaagaaggggagagtggctcttaagtattttgaagtacttattttggtagtgctccaggacagtaacacacagctgttacctattttatttcctataaacagaattcccattccctaagccagacatgatcacccgtttggaaggggaggaggagtctcagaattctgacgagtggcagctccaaggaggcacctctgcaggtactacaagtaaagcagttcagcgtccatccagctgggaacattgtggagtgggattttcagtgtacattccacggggtatttaagaggtagaaggattatgggttttggagttttgaaatctccctctttgcagtgctaaatgtgtgacagtgtgtgacaggcaactgcttttacctcagagcttccattcttcctctatcagctctgagtaacaagacttgatgtatgaccttgtttgtggatgaagcaaaatgaggcttgtgcagcatttggtctagtgcaccttctggctgaacagggctccctcagtggcgtaccatgtgcctctgcaaactaagaatagtgagaggaagcacacttcctgagttacctggctccctgtccatctcatactggatagaaaaagcaatagcaatcatagcatacatttgagcaaatgtatctaagaagtacctagtcctttgtcaagaaaaatggttattgaggccacagttgaataaatatagcattgcctccagacggccaaaatagttttatcttttctccggaagtaagagtttaaaatgccatatttcactgactctgagacatgtttttctcccattgctttactgtttctgaaattgagaatgcctcttaaaatcagtggcatgtcatagcttaattagtagtgttttctttcttaatggcacataatgatgcatcctacaactgatgacattttagtttgggtgagatagggtaatttccccaaatcatattcaacttctgtgaccaccttctaaatataaagtgaaacctggttgcaccattaatgtgcaagaactaattttctgccttataagcttaactttgctaagtgtggtttttgctgtaggttttcttggttctaaagggatatgattcaggccatgatgcatctctgtaatattatatggtagtatggttaacatttggcttctcattcacataaaaagtattttgatgcaaacatggcccccaaattatttggtccaagcttggttcctctgttgagttcccagctctgccactttctggcttggctaccttggtgcattatgtaacctctgtagcctccccttcttcatctgcaaagaaggaacagtgatacttagagttactctattaagagaactaggtgtgggtagtccacataaattggcatatggaaaaggacttaggcaatgttacctgttattaaagttactacttttggtgaacttcagattaaggtattcttagcatttcaacccccaaaaatcagggtataagccattttacttactggcattatttttgcccctcactatttgtctcccagaaaatgaagaatctgacgtaaagcctccagactggccaaacccaatgaatgctacctcccagtttcctcagcctcagcactttgacagctttggcctccgtctgcctcgggatatcacagagctgcccgagtggagtgaggggtaccccttctacatggccatgggcttcccagggtatgacctctcggctgatgacatagctgggaagtttcagttcagccggggcatgcgccgcagttacgacgcagggttcaagctgatggtagtggaatatgctgagagtaccaacaactgccaggctgccaagcagtttggagtattggaaaaaaacgttcgagactggcgcaaagtgaagccacagcttcaaaacgcccacgccatgcggcgggcattccgaggccccaagaatgggaggtttgctctggtggaccagcgtgtggccgaatatgtcagatacatgcaggccaaaggggaccccatcacccgggaggcgatgcagctgaaagctctcgaaatcgcccaggaaatgaacattccagagaaagggttcaaggcaagcttgggttggtgtcgaagaatgatgagaaggtatgacctgtctctgaggcataaagtgcccgtgccccagcacctgccggaagacctgactgagaaactcgtcacttaccagcgcagtgtcctggctctgcgcagggcgcatgactatgaggtagctcagatggggaatgcagatgagacgcccatttgtttagaggtgccatcacgggtaactgttgataaccagggcgaaaagcctgtcttggtcaagacaccaggcagggaaaaactgaaaatcacagcaatgcttggtgtcttggctgatgggaggaagttaccaccgtacatcattttgaggggaacatatatccccccggggaagtttcccagtgggatggaaattcgctgccaccggtatgggtggatgactgaagacttgatgcaggactggttggaagtggtgtggagacggaggacaggagcagtgcccaagcagcgagggatgctgatcttgaatggcttccggggccatgccacagattccgtgaagaactccatggaaagcatgaacactgacatggtgatcatcccagggggtctgacctcacagcttcaggtgctggatgtcgtggtctacaagccactgaatgacagtgtgcgggcccagtactccaactggcttctggctgggaacctggcgctgagcccaaccgggaatgctaagaagccacccctgggcctctttctggagtgggtcatggtcgcgtggaatagcatctcaagtgagtccatcgtccaagggttcaagaagtgccatatctccagcaacttggaggaggaagacgatgtcctgtgggaaatcgagagtgagttgccaggaggaggagaaccaccaaaagattgtgacaccgaaagcatggctgagagcaactgaagggaaagggaaaggtaaccactcaggagtagatactcagtgcctttgctgacatgtctgtgttctacaaacaccttctctccattatttttctgtttttaagttcccttagagcctacagtgcagtagtgtagatcaggggtccccaacccccaggtcacggaccatactggtccatggcctgtcaggaactgggctgcacagcaggaggtgagcggcaggtgagcaagcattaccacctgagctccgcccgctgtcacagcagcggcattagattctcataggagcacaaaccctgttgtgaactgcacatgtgagggatctaggttgcaggctcctcaatgcctgaggatctgaggcggaacagtttcatcccaaagccatcctaccacccactaccccgcacttcctgggtccctgcaaaaattgtcttccatgaaaccagtccctggtgccagaaaagttggggactgctggtatagataacagaccattagcattttctcctttatatgaaacatttattatttgatttatttgtgtctattttgctctgtggcttggacccagaaacacttgtataataggtgaaatgaacaaagaatgagctgccagaacatctgagagctgtaaagttaaaattatttggacccaaagaagcatagtctgacgttgttcagttcacacaaaattttgtctgaaaagccaacttttttctttcccttttaaattatgctgaacatttagggccagtatgtgtaactgacatgctgggacagttgtactcacttttgctggcctgtaggactgtgacatagggagaacactaagtgtgtcctccgggcctcgggtctcagtcctggagctatctacagtatgttaccagcgagtaagaataatagcttctacttgcttttccctacagagttcaggagttttaaaacgtcatcttagtctcattatgaccttcacatgggctatgacaataatttcctgtagtcagcagatgtctgaaggaagatattttttaactgaatctttacaccaaaaaaagaaaataaaacggtgcgtatctaggactctagtgagggctgaggacaataggcctggaattttctgggttgagtacacaagaagaacagctttcaaaggaaagtaggaatggaggcctaactgagacaacactagtgaaatgaccccacccacctacacctccagagaggaggaggatgagcatgtacagcaggggggacacccacaaagaacaaacaattcatttacctgttcgttctcatctccctaattataaattaaattgatcctccagacagtgttttatatgaaggaagaagccaccttttttacagaggacctgaaaccgtcaaccatcttcacacattctttttctttcttttaaagtataattaggtatttccatcttccttgcttttttctccaaatgaaatgctaatgggagccttattttacccacttcagctatataagtccatctgtgtttcaaagagtgacttatgtctcctgccttgcttccaaattaaattgtactcatattgctgaatcccattgtaattctgggatccctggaattacaatggagcaagaagttcttactattacattcaaaatcaccaaaattgcttttttttcccccttgggtcctccttgctttgagaaaccccatgaatccagcctcccttttctgctgacccttatattgcctgcattggatatcaaactgaattacattgagtttccatcttttcttcatttaccttttgcttttccctctccttgttagataacatttttgtgcacttttaatttcctaagctccttaccacctcagggacatgattaaaaacttccagaagaggaaaggagaaaaagctatgctaagttgcatttatgaatgttggcctgtaatattggtcatgagcttttgctcttctagtctgccacaattctctctgcagctcctgaggaagtgatgggagtagacagattcacagtgaacaagagatttgggagaccaagtgggcataaaactacgtcttggcctctatttggaaatctgaatgatggaattattatgtttgttaaaagttataccaaaaagccaagggttaattcatttaggttctctctgttttccagcaaatggaactctgatttaaacagctggggatgaaattcctcaagatgattattcctgaaagtgtggatgcgctggatgcgcagggaacatcaggaaaaggccacggggctctgaacagccccggtccagacagcagcctgtacatccatcccaggacacagcccagcccctccccacaccatacaaggtatcagaaaagtctaggacctatcatttcatcagagacatgatcagaaaagaaactgcttctgccccatttcttgttttggagattactccatctgtccatcaaaagaaacctgtaaatatgaaagaacaaaggttatttcctggagaaaagacaatttattcaacaccaacgagggactcatcatatgggcacaactctggtgtccttctatggagaaaacctcaagtaaagttttattctgcctttgaaaatgcttccaaaagtagaccctgtccccacacaggtcaagactacagagaaggctttgtagaaatgtgtcacctatgtacacctgctacttacacatttcctcttttggaaaaatgagatacttagaataacaagaaaattaagacatactggcctggtgccagcagatggcttttctatagacaaactaggttagtgtggaagatataggttaaaataaactatgctgttttatttatcttcccaacctgattggcagctagacttttttagggtctcatttaatggccctgtttttttcattattatatttaatgatagggcaggatttcgtatgcaagctcttgtttctcaggctgcctgcagaagaagtcgctataaattatctgttgtctacatggtacaaggcccattgactcatctgatgcttgttttgttaatttctttaatatttttatcacggggcagtgggagggcttgggcttttagccacagctgttttaagacttctgatctcctgccctgcaggaataggtgggaagtcattgaatttttacactatagtaatttgcattcccacataagtttgagtgttacgaaaacattcctttaaagggatctgtgctacacaaaatatgccaggacctcacagacaaagccattgctagaaatgtcattccaatgatcagatctggaaacaggctgccataaccacttttccttcttgtagactcagctcacctgtatatttaaactgttcttggcatcttgaaacacctatttctactcaggtactcattgtcctgttactgattcacctttctgatccttttcaaccagttttcccccaaggggggaaattttacttaacctctagtatttgaacaactcaatatttgaattgttgccccatttgcttttacctgtactgtattcttggtcatctcaaatggcgtctaaacccagctactttgcattccagaagtttccattccctccaattccacctaatttttcatctgtcctagttactggctctttcttcatgtcttatttctcttgctttgggagcttaaaagattttacaagacctaattttgggttccttccttggagccatagttaccctgccaagaagagtagaaaatgggttcaactcctgtttcgctccaccaacacctctgtgagtctcatcatcagctgagcgatgatgccttacaggttgcatagcactggaactttcctagagtaacggctctgctgccagggtttctctgggctcattcttccactgacttaattatgatctatgcctaacagagccccagtacaactattttgcagaatggctgttaccctagaattactatagcacatattgagatatagttgtactccctagtagataggaactgaccccaacaataaactttgataataaagacaata

SEQ ID NO: 876 - DNA, 720 bp, Homo sapiens
gtcttccagcattctatggtcccaccaggtgggtaggtgactaggaattcaggccaggtcctagagagtagtgagaagttttccagtttgcagtttcctctgtgctgtatgtacagccatacagcctatggaacctgacattgcagtgggcagcaggacacggtcaaggctcctagctgcctctccatctatggaactatgaaatttcacacatattccctaggcagcattaaggcccaggtatattgagtagtccaaaccaaaaaactatattcgagtatcagtttaaattcttccaagccctaaaaattcttacgtagtttctcacctaaaactaatggcttgtgccaagaactgaaactaagctattgatttttttttaagaagtcttaatctatacataagaaattacatacctggccaggtgcagtagttcaggcctgtaatcctaacaaacactctgggaggccaaggtgggcagactgcttgagctcaggagttcattaccagtctgggcaacatgataaaaccgtgtctttacaaaaaaaaaaaattttaaattagccgggcatggtggtgtgaatctgtagtcccagctacttaggaggttgcgatgggagaatcacctgagcccagaggtccagtctgcagtgagccatgatcacaccacagcactccagctggggtgacagagtgagaccctatctcaaaaagaaaaga

SEQ ID NO: 877 - DNA, 3126 bp, Homo sapiens
cttggcaatgtattaaacagcaggccttggagactagcacttgagttaacacagccaccacaaccaccactgccatcatcaccttcccggaaagcagccacctgtctggctcctggctttgtccagctgccaacctaaggcatgtgcctacgcaggaggcgatgacattttggctccacgttcaaagttgttttttttttcctttctcatgtgttatttctaaagataacaaaggtcaaaaggcatccagcgttttctggtttctcataagcttctggtcaatatttaatctggtttatggattttttttaggtcttctagatgccttcttgaggctgcttgtggccacccacagacacttgtaaggaggagagaagtcagcctggcagagagactctgaaatgagggattagaggtgttcaaggagcaagagcttcagcctgaagacaagggagcagtccctgaagacgcttctactgagaggtctgccatggcctctcttggcctccaacttgtgggctacatcctaggccttctggggcttttgggcacactggttgccatgctgctccccagctggaaaacaagttcttatgtcggtgccagcattgtgacagcagttggcttctccaagggcctctggatggaatgtgccacacacagcacaggcatcacccagtgtgacatctatagcacccttctgggcctgcccgctgacatccaggctgcccaggccatgatggtgacatccagtgcaatctcctccctggcctgcattatctctgtggtgggcatgagatgcacagtcttctgccaggaatcccgagccaaagacagagtggcggtagcaggtggagtctttttcatccttggaggcctcctgggattcattcctgttgcctggaatcttcatgggatcctacgggacttctactcaccactggtgcctgacagcatgaaatttgagattggagaggctctttacttgggcattatttcttccctgttctccctgatagctggaatcatcctctgcttttcctgctcatcccagagaaatcgctccaactactacgatgcctaccaagcccaacctcttgccacaaggagctctccaaggcctggtcaacctcccaaagtcaagagtgagttcaattcctacagcctgacagggtatgtgtgaagaaccaggggccagagctggggggtggctgggtctgtgaaaaacagtggacagcaccccgagggccacaggtgagggacactaccactggatcgtgtcagaaggtgctgctgaggatagactgactttggccattggattgagcaaaggcagaaatgggggctagtgtaacagcatgcaggttgaattgccaaggatgctcgccatgccagcctttctgttttcctcaccttgctgctcccctgccctaagtccccaaccctcaacttgaaaccccattcccttaagccaggactcagaggatccctttgccctctggtttacctgggactccatccccaaacccactaatcacatcccactgactgaccctctgtgatcaaagaccctctctctggctgaggttggctcttagctcattgctggggatgggaaggagaagcagtggcttttgtgggcattgctctaacctacttctcaagcttccctccaaagaaactgattggccctggaacctccatcccactcttgttatgactccacagtgtccagactaatttgtgcatgaactgaaataaaaccatcctacggtatccagggaacagaaagcaggatgcaggatgggaggacaggaaggcagcctgggacatttaaaaaaataaaaatgaaaaaaaaacccagaacccatttctcagggcactttccagaattctctcatatttgtgggctgggatcaagcctgcagcttgaggaaagcacaaggaaaggaaagaagatctggtggaaagctcaggtggcagcggactctgactccactgaggaactgcctcagaagctgcgatcacaactttggctgaagcccctgcctcactctagggcacctgacctggcctcttgcctaaaccacaaggctaagggctatagacaatggtttccttaggaacagtaaaccagtttttctagggatggcccttggctgggggatgacagtgtgggagctgtggggtactgaggaagacaccattccttgacggtgtctaagaagccaggtggatgtgtgtggtggctccagtgggtgtttctactctgccagtgagaggcagccccctagaaactcttcaggcgtaatggaaaatcagctcaaatgagatcaggcccccccagggtccacccacagagcactacagagcctctgaaagaccatagcaccaagcgagccccttcagattcccccactgtccatcggaagatgctccagagtggctagagggcatctaagggctccagcatggcatatccatgcccacggtgctgtgtccatgatctgagtgatagctgcactgctgcctgggattgcagctgaggtgggagtggagaatggttcccaggaagacagttccacctctaaggtccgaaaatgttccctttaccctggagtgggagtgaggggtcatacaccaaaggtattttccctcaccagtctaggcatgactggcttctgaaaaattccagcacacctcctcgaacctcattgtcagcagagagggcccatctgttgtctgtaacatgcctttcacatgtccaccttcttgccatgttccagctgctctcccaacctggaaggccgtctccccttagccaagtcctcctcaggcttggagaacttcctcagcgtcacctccttcattgagccttctttccccactccatccctctcctacccctccctcccccaaccctcaatgtataaattgcttcttgatgcttagcattcacaatttttgattgatcgttatttgtgtgtgtgtgtccgatctcacaagtatattgtaaacccttcggtgggtgggggccatatcctagacctctctgtatcccccagactatctgtaacagtgccaggcacacagtaggtgatcaataaacacttgttgattgagtaa
